United States Patent Application Publication US 2024/0226191 A1 - sequence listing, part 4

SEQ ID NO: 26 - DNA, 3086295 bp, Mediterraneibacter faecis (residues 1,543,149-3,086,295 of 3,086,295)
gatacattcttttgtcacatcatatccctcttccagacaatgctgataaatgttcgggaaatgacccatgatggtttcttttccaagtttttccatggacagccagacatgatctgtgccttccttttccatctcttctcgaattgctttagtcacaacatctcttggaagaagttcatttacgaaacgttctttcttgctgttaagaagaactgcaccttccccacggacagactctgaaataagaaagcgtcttcctggtttcttggaatacaatgttgttggatggatctgtacataatctaaatgctctaaacggattccgtgtttttcggaaatagtaagtgcatctcctgtcagatgtgggaaatttgtagaatgcttatagcgtccaccgattccaccgcttgcccagattgtattctctgtatggatttcgaattcatttccatctttatcctgtgcaatgattcctctacattcatcattttccacaatgatatctgtcattgttgtatattcaatcaatgttacattagaaagctgctttacctgtgcaagcagtttacttgtgatttcttttcctgtaatatctgcatgaaacagaattctcggacgtgaatgtgctccctcacgagtaaatgcataaatatcctgaatctctgccttttcaccaccgttgtctgcggcttcatttccagactcatctgcctcctgtttttggaaatctacaccatagccaatcaggtcatgaatgatctctcttgagctgcggatcataagatcaacagattcttttctgttctcataatgtcccgctttcattgtatcttcaaaataactgtcatagtcatctttgtcatgcagcatgcagattcctccctgagccaggaatgaatcactgctctctaaatctgactttgtaatcatgatgatcttctgatctctcggaagactcagtgcgctgaaaagccctcccacacctgttccgacaatgactacatctgcttccattttcataataaatatctccattccgacagcgactgtcgatttgatctcattatttttctttgatcttcgattgctgtcaatcctatctgccctctgtttacttggccagttctaacattctctctaacggtttcttagattcttcacgaagcttatcgtctacaaaaacttcattctcgcctgtctttaatacatgaagcactttctcaagtgtaaccttcttcatatttctgcagattggagttgtctctgtaaagtaaaatttcttctcaggatttctcttctgaagttcatacaaaacaccactttctgtacagatgataaattctttcgcatctgattttcctgcctgcgcaataatttctgaagtacttccgacaaaatcagaaagttccagaacctttgccggacattctggatgagaaagaacctctgcttccggatgtgctgctttcgcttcctgaatctcttcaacctccatgtattcgtgtacgatacagaagccttcattatatatgaagttcttttccggaaccaatcctgcaatataatgtgcaaggttacgatccggtataaagaaaatatttttattcggaagtgcttttacaatcttcaccgcattggatgaagttacacagacatcagaatgtcttttcagttctgctgttgaattaatgtagcagacaactgcaagatcatcatactctgaacgaatcttctcgattgtctccgcagatgccatatgtgccattggacaatctgctgccatatccggcataagcactgttttctcaggattcaggatcttcgcactctcgcccatgaatgaaacaccgcagaacacgattgttttctctttcagaccaaccgcaactttgcttaaatagaaagaatctcctacataatctgcaatctcctgaacttccggtcttacataataatgcgccagaattacggcatttttttctttctttaactgttctatctcttctctgatcgtcatagcacgtacctctcttattctctcctgacataaaattctgctgtaacacactttcatgtctattgctctgttgatttattcttgcccattataacactgtcgtttacaggtgacaagacacttgttttacaaaaactttacaccaaagaagtttcttttgtgaaaaatgtaacattttatatgacattgttctttttgtgaggaaatgatgagggaatttcctctataaattgccgggaaataaagatttgtcgtagggattctttttcagtaaacagaaaacagaaaatatgaacttcgagaagtttcatgttagaaggatggtacagggacgaagacgaatgtggagcatgcttgctcatacttgaaaaacaatggattgcgttaaagaaaggattgacagctgtctgagcggcagcgagtttgtcaatcctttctttgctcttagcagtctgttgtttttcctagtatgaacagtatgcgtaaccctgagtcggcgttcctgtaccattcttctaacaagcgactttctaaaataatattttcagttttcgtccgcactcaaacaagaatctctacgctaaatttttattttctcaactgccagaacgccactgcacttgctgctgccacattcagagaatctacaccatgtgacatcggaatcttcacagtataatcgcaagctttaattgtctcctgcataagtccgtccccctctgttccaagaatcactgccagtttttcttcactcataagctgcgtatcatcaatacttaaggaatcatcggttaatgcaagtgctgctgtcttatacccaagtgctttcaggctttcgattgcctggaccggccagatctctttcctgtcgcatctgcgttctttatcgtcttgaataaatgtccatggaatctggaacaccgttcccatacttactctggatgctcttcgatacaatggattgctgcatcctgaagtcagtaataccgcatccatatgcatcgctgctgccgatcgaaagattgctccgacattcgttggattcatcacgtcttccagaatggcaatcctgttctttccctcgcaaagtttcctgaaatcttccagtggtcggcgtttcaatgcacaaagcattcccctcgtcagcttgaatcctgtcaattgcgtaaggacagcaaactctgctgtaaaaatagaagtgcctgtattctcaaatcttgcaagaacttcttgcgtctcttcattttcttccatctgtttcttttcaaccagaacagatattggaatatatccggcatccaacgcccgtccaatcactttcggactttctgcaataaaaagtccatcttccggacggtctttattcagaagctgtgcttccgtataacgtgcgtagacgtccagttccggtgcgttaaagttgttgatttctataatatttaacattttctctccacttattacttatattttccaatcaattttctataaaaatccaccatcagatgaatctcttccacagatatattttcattttctccgtgcacagatgcgtattgctgtttatctatatcgattggagcgaatcgaatcacggcaccgccttcatccacgatccactcaaaactgatctgattctcattgaaatagtcgaatgccaaagcattttccgattccatgatctccacacattgcaatatcacataatcttgcaatctcttcgtcactacatccggctttctgcctcgtccaccaagagataaagccagaacgcacggtgctctaaaagctctctgattttgactacaaacttgtttttgatctttggttcattcacaatttttgacataatttttccccctgtctgtcgataaaattcctgttactattttatcatacacacaggggggaataaagattaaaacacatattaaatgataccgtgatccttcgccaatgctttaatactgcgatcataagttgcttctgcttctttcgaaaagaaacatcccggcacgccttcattgtgatcacgatgataaactacacacgaaacagactgttgtaaaaaccgaacattttactacatgagatgcctccaacgtctcacttagtacccaggaaatgatttttctgaaatatagatccataatactggtaagatatgcatatcctctcctttctaaccatatacctggcttatttttttctatattttaacggagaaactccatatgtttttttgaagcttctgataaaatagcttacattctgatatccactctgcattgcaatctctgtaacaggaatatccgtatcttgtaacagctgttttgcatgctctaaccttaaatgtgttatatattgcgaaagggtaatatgaaaatgttccttaaaatatcgcgatatatatttttccgaaagatgaaactgctcactaaattcttttaatgatatcttttccataaaattctgctgtatatatgaaatcatttctttttctatcgtatttctcccgcttttatcattttcaattacaaagcccttctcccacatttcaagaataaactgtaaaagaattatttttgtctttatctgagcagttattatggactcagttttcttattttttgccacatatatttcaaccaactgctcacatagttcttttgctgtatcttttactcttggacttatcatcagatgaccattttttaacggctccaataatttatcatccaacatgtcatttatgcaaaaagatatgtattttaacggaaaaaggaaagtaaaataatccactgtatcagtctgtgaacccataaaatgcagattacccggcgacactacaaaagcatccccgggggttccaatataattttctcctgatatactaacagtcaaaaaaccgctttttacatatataatttccagttcatcatgccaatgaaccggtatctgaaatgatcgtccttcattttttatatgatatgtactaaacggatcatcctttgtaccatgtggtttattttcctttaattcaaagtacatactctctcctatacttctacaagacctttactcttccattttccactcttccatctaagtaccattcccactgctctcgcacattcgtcacctgccatagcaatatatgctcctacagccagaagtcccatgtgtattccgagaaaataggttccgccaactgcaaacaaatacataaatatcgcacctaatataaccggaaaaaatgcgtctccgctcgtttttaacgcctgcccatatacaaggtttgttacccttccaagttcaagaaatatatctactattaacaactttaccacaagatttatcatctgtatatcatccgtaaatatatgcacgataaaatgtccggcaaatgcaaaggtcacggaaaaacatgtcgctgtgatgataccatatatcgcagcttttctcgtccccctgttacattcctcaaactcttttgctccaattctccagccggtcataattgcatttgcctgagcaagggcagctcccacgcaatacgagaaatttgcaatctgtatcgcatatgaacgcgctgtaacattcattccatccacatccatctgattcataaaacgcacaataaaggtcattgcgatgttgtaaagtgctgtttcaagcgcagaaggaaaaccaatcttaacaatctgcgcaaatatctttcttgatgcaattcgctcaggactctgttttgcttttataagcacagcccccatacctgctacaataataagatttacaactcttgaaataaccgtggcaacagcaactcccatcacaccccagttgaatgcaaataaaaatactgaattaagtattatattgagaacatttccaacaacagttcctatcaaagaatgttttgtatatccaaacactctcaaataactggagaaaataggaatcagtgcatttaaaaaacatgtgccgccaacaattctaagatatatttcagccggctcaagcaaagccggagcaatacttacgcttctaagtatcccaccagaaaaagtagcaagaacgacagacattacgatacctatcaatgcgttgaatataagtccaagttgccttgcctgatatgctatccccggtcttccagctccgatattttgtgacataacggctatcatacccgatgatattactccaaacataataataaaaacacttatatatgtatttgctgttcccactgctcctacagcctgatcacttacagatgatagcataagcgtatcaaccatacctgaaagcatataaaataaagtttctaagcatattggcacagatagctgtgttaatgtttttctttccgctgccatagtttttctcctcacatacaattcaagaatactatatcaataatacgatatatttctatgtaattcttgtataatatcatgtgaaaattgcactatttctactttatcttaaagagcactgggtgcgagctaaattgattactcatgcttacaaggatttgcaaatcaggataactttttccgttttcccaatttgaaacagtttgcctggtaacatgaaataatttgccaaactcctcttgtgttaatagaattttaatccaatactgaataaatacaacaccgttaaaaagaaactcaaagctaaagttacagaacggaaagagcagctcaaaggtacttttaggtaagtattatgactatcaccgccgtgatattgccgccaatgaggtagattatctcaatgtggaagatcctgatgtttttcccatcgtgcctgggaacttgaatatcagaggaaacaggagatgcaacgaaatcagcctgctcggactaagaaaaaatcatatgatatagaattgtaattttctaaaaaaggcgcatggattggatccatacgcctaatttacacattgttattattctttccgaattctttcaacaatgctttcccgactcatcttttcaaactgatactttggtatcacatacgcaatcccaaccaaaatcggaatcataagcacacatggcactatcgtaagatgcagccggaagaaaaatgccgtaccgagtgtatttgctaaaatcttctctgccccaaacacaactaataatactgcaatcacaaatgcgcctcccaaatatagaaatccctcagtcactagcattttcgatacctgttttttcgtcattccaacaacttccaaaagcgccagttcctttttcctgctgattacagaggttgctgttgtattaaagaaattcataataccgataaatgctaaaataacgacaagaaaaccaccgatcatataatatttgctgacaaactgctgaaaactctctttcatgtccaatacagaaaacacattgatcatatcattttctttcaaaatatttttatcaatgtattcttttatctgcttgtcctcgcccttctttgcatcgatggcagcatacatggctgattcatttcccgtctgggtaatatactcatcttctggaactaataccgtaatatagataaggtctgcatacggataatccaatgcatatggcatcagtgcttctccaatgacttcgtaatctttttggtttccatttttgtactccatctgaaaaacatccccagtctgataataagaaaccggatgctctgcatatttatcaccataatctacaagcacataatttccgcttttaaatgtatcccaagagcatttttcccctctccattctaatttgtcaaacaccgactcgctgattccgagaaaatgaacacttactgtattggaagcctttgcatcttcccaaacctgttcttcataatcagtccagtttttttcatatttatctgcgaatgcttcccatgttttcagaagttccggctccatcttgtgggtttcttcagaataatacacatatcctgtcttagcactatcaggacattcgtccaaaatctctttgatttcaggtgtaataccgttgaaattcgtatttgacaaacttcccgtcatctgatccagttgaaaatcggaagctaaaaatacttttcggtaagaatcaaaatcatatccctgcaccaacatcacgatacagttgacaaccaccatagaaagagcgatagaaagcataacaatcaatccctttttccaatttcgtaacacattttgaactgccatcccccaccaggttacagaagtattcttttttattttcctatgtgactgctctccttctgccaaacgcagagcttccacaggcgaaactctttccaccattttacaagcctgcagactggagagatacaccgttaaaagcgttaaaagtatcgctgcaaggaaaatcaaaggatttgctgatactactgtctgaaccgtttttcctgcctgtgcactaatttgggcatctgcagtcaaggacggagccatacaaagacctgcaagataaccacaaagcaatccgattggaatgccaatagctgataatctccacgcctgcatacgtacaattttcttcaactgctttcccgttgtccccacattctttaacaatccgtaagcccggatatccgttttcacagaaatgttaaaaatattataaataatcaggtatccagctaatatgacaaatagaatcattataattaaagaagagaatgaaaatgaatcctcttcaaagagattatatgccggattgacttccattcctgtcccagctttcgtaaatcccgctgctttggatatcttttccgttttcttttccagattccaaaggttcttgtaccagacagaatactctttccctccattgtagatgccattttctaattcttcctgcgtaacgggataacgattctcctttgcataggcttcggatacccagaccatctgacctaaaacagctttatccccctgccaaaatccacatatctgaaacgtatctgtcttatattgtttcagcataggatttacttcccaggtcagcgttacttcttccccaatctttggtgtaacacccaaagattccaatatcgtgctactaagtgctacttcattttctttctctggcagtcttcctgtagttggcagacaattaaaactttctgccatattttcatctgcatatcggacctctacggaaaatccaaaccgttcgtccattccagctcccagaaaaataccggaaccatatcgttccacatcttcatcctgttctattgttttttgcaatctctccgcatcttcttctgacaaattctgcgcaatagcatgggatgaatccataaattgcttaatttccgttgctcttttggaaagtatcatggatacactccccacaaagaggcttgtaaataacagtgatgtcaacatgattgcaataacagcaataatatttcttgctcggttcattttcataaaacgtttcgtcaataatcgtaacgtttctttattctctacttttaccatataatcgccctcactataccaaaccactgtctgaaacaatttttccgtcttcaatctgtaaaatcctgtcagccatctgggcaatctcctcattgtgagtaatcattacaatcgtttgatgaaaacgcttactggtgacttttaaaagtcccaatacatcctgactcgtttttgagtccagattgcctgtcggttcatctgccagcaaaatagcaggttttgccgctaatgctcttgcgattgccaccctttgctgctgaccccctgacagtgcacttggaagattttccagttttgtccgaatacccagtgtatctatgatttcatttacataacctttttcaatcttttttccatccagttttacaggaagaacaatattttcccatacattcagcatcggaaccagattatactgttgaaatacaaatccaatatttctacgcctaaaaatagtaagctcttcatctgtcatatggcttaaattctgtccgtcaacaatgacctgaccggatgttggattatccaaaccaccaatgatatgaagcaatgtagactttccacttccagaggttccaacaatcgctacaaactcccctttttctacttccaggtttataccatcaagagccctgacttctgtttctccctgcccatatatttttcgtaaacttactgcttttaatatattcatgccatcctcccatcaaaaaagcctgtattgatctttacaatacagactttatcataacaatgtctccatctggtttctgaaatgtcacagttttgatactattccttctttgctatcggaagaaacacagaaaatgtagaaccctttcctctctttgatgtcacttttatataccccttttgtgcctgaatgatctctcttgcaaggaataagccaattcctactcctggctggtctgccactgacagactccgataaaatcttccaaatatctttggtatttcttctttttctattccaatgccatcatcaatgatatcaatctttacaaaaaaagaatactgctcgacttttatctgaacatttcccccacatgctgtgtatttaatcgcattgtctacaatatttccgagtgcctccacggtccattttgcatcacacatagcatgtaaatccgtgtcaaatagactcagggaaatatccttctccattgcttttacattaaactgctgctgtacggatgcaaacatctgtgcaatagcagtatcctccggatgtactgctataattccgctctccattcgtgataatttgaccagtgattgtatcagaaaatccaatttctccgtctgctccaaaatggtagctatctcctcttgattttcattactcacttcagagagtatttctccatagactttcagatttgaaatgggagtcagtgtctgatgcgcaatatctgaaataagtttttgtatcacttctttctgttcctgttgatttttttttgccagaaaactactgtctatatattgtttcatgctgttttcaagagcagaatacttttcttctgatatttctgtccgttccagttctccatctattgcacaatccagcattcgctgtagccggttaaaaagctttttttctttctgataaaaaaagctgtaccaaaaaactccgctcaggacaaatataactacaatcaacataattgtttctatcatccattcaccgcccatgtataaccaattccataaaccgtcttgacatattcaggcttctgcgtatcatcttctaatttgtctctgaggcgtttgactgcaacagtcagagcatgagcatccacaaactctgtatctccctgccatacctcgtcaatcagatattcccgtttcaatacttttcctctgttttcacacagcactctaaggagcttttgttctgtcttactaagttcaataggttctccatctttgaaaaattccattttatcgaaatagaactcaaatccatcaagctccatagaatttttagctgctgcctctttatttctaagctgcacagacactcttgcacgcaaaaccatcaagctaaacggtttcgtaatataatcatttgccccagcttccaatcctgttacaatatctacttccatgttatttactgtaagcagaataatcggcacctgactgtttttccttatttctcttacaaaatcaatcccattcccatccggcaagttcacatctaacaaaaccaatgtgatatcttcctttttcaagatctctctagcctcctgcaaagtctggcactgataaaagaaataagcatcatcctttaaagccagacggattccatcatttaattttttgtcatcttcaacaatcagtaacttttcactcatattttctctgctttctttcaaattacgctaattgtatcattgccagttttataaatcaaatcattaaatcaaaatctccggcagaaattaacttataaacagcaagaggctgttgctaaaatactgtttagatttatcatacatacaaaatggaagttatctatttctcctcttcgttaagacctagttcattacatattacttgctatccctgatatcttattctttctaccagcgtttcctttttcagattactgcttaaaatgcaggaaagtacaatctgcaataggccgaccaaaaaaatcataataagaattggtacgattggaacatgatagatattcattccaaatattccattatgttttgcataggaaaaaagtgcatagccgagcggcagaccaatgatcaaagctacgcatatggtaccaaccgtaaacatcattccctgtaactgcagacataaatttaattgtttatttgtcatacccacagcctgtaatacaccatattcctgcttttttgtcgtaatattcatgattatggtgtttgccatattcataaaaccgatgagtcctacaaccgccataaacagataacagccgagcttcatcatgcgggctgcgaattctgcagattgtaactgtgcatgataggtatccatttttatatgcgaagtattagaaatcaaagtattcagactctgttccacagatgccacatcttttttatcacagtccacccacagatagccataggctgttcctctcggattcatggaacggtatacaccttccggaatgacaagataagtgtctgcgcttacaaaggatcccgcaatctttccctgataggtataggttccacttccattctcaaagtcaaatgcaatggattcacccggagcatatccatcttgttccatccacatcgaccagccaaagaaaatttcaccattctttaccgcctgatcatagtccatagagccaatatccccgtcctggcgcataaaatcaaaatcatttttactcacaatagcagccggaaatcttgttccgttcagatttacagagacaatctctctcgtcatgacatctgtcacgcccggaatgcttttgatttcttcaatcagcgaatcattcaatggattatccgtcagaatcgtatccagattattctccggatatctttcatcgtactcagcagaatagtcaagctgcagttccaattgtccatgattaacggaaagacgtgcttcatgctccgtatcaatatttcctacataattagagataatcacaaacaatgcgcaggaaagccccagtgtgaggatggtaccaatggttctttttggattacccgttatatttgccattgccatagaaaacacggtgacattttttctgccatttcgttttccttttttgtgtgtttctgcattttctaaataccgtgttgcttcgataggtgaaatccgtgaaacaattttcattggtttgcgcagtgccaaagcaacggtaagaaatgatacgaaaatacatagaagtataacaggcagggaaaacagtggcacctgctgattttggactcccatagagcccgttccggttgatacaagatttccctgttctaccagccagttaaaaccgcattttgcaatcagaaaaccaagaagcaatccaaccggtattgaaaaaattgtcaaaaaaatgccctctctgaagattagttgtttcatctgcttttttgtcgctcccagagccttgatttttccatactcctgtatcttgttgacaataccgacctgaaaaatattataaatgaccacaacagagaaaagtacaattgcaagaatcagaattccacataccgcaatcgtttcataactcggctgcaagacccattgcaaatagagatcattgactataacgtttttttcttcgattccacaagatgctgcaatctgctttataaccggttcaatattattcatagatacatttgcagaatcgtttaacgtaaaatagatattatactgtctgtcattctctgcgacgtgctcatcataaaactcctgtgacccgaaagcaacataagatgcctcgatggtatactcctcccggtcatataggattccgctgacaacaaactcttccggcttatattctgaccgcatccctgcacggtaatccagtgtaaccgtatctccgacctttacatcatcatatcccattgcacgaaaaaaagctcttccggcggcaatttcctgtattttttccggatactttccttcctttaactcatattccttattatagggaagcatttttcttgcagtctcatccatgcagacaaacccgccattttcattgcctttaattatgccttctgtacacataattcctattgcatctatttctgcacggcggcttacttcctttaactgcgattcgtctgcggaaacaaacagaccataattgcttccatatgagcctgccgcctgacttttctgcaaacgtatcattccatttcccacagtactgataatcacaagcagcatcgtggtcagacatatggacatcataatcagtatacttcttgtcttgttctttttgtcattgctatatgcaatcctgcttattgtcttcatctgaaatccaccacctgtccgtcctcaatcaccagaatacggtcagcgacctgtgcaatttcgtcatcatgggtaatcattacaattgtctgtccatatttttttgctgtcatcttaagcagggcaatcacctcatcactggtcttagaatcaagattgcctgtcggctcatccgcaaatataatttccggacgattcaccagtgctcttgcaatcgctactctctgctgctgtcctccggataactgatttggcagattgtaaatcctcttttcaattcccagagttgcaataatatcatttacatacgcttcatccacttttcttccatccagccccagtggcagtacaatattttcccagacattaacagatgaaaccagattaaatgcctgaaaaacaaatccgatttttcttctgcggaaaacagcaagggcatcttccttcatcctgtataaatctttccctgctaaagtaacactgccttttgtcggggtgtctagccctccaagcatatgaagtaatgtacttttaccggaacctgactttccaacaattgcgacaaattctccctgctcaatctgaatgtccacctgattgaccgctttgacctgattctcacctgcgccataaaacttacaaagctgcttggtttctaatatcacactcatgtgttgcctccttttcaattctgtaaagcgtaccttttcagcacactttctttgcctgtttatataattggtcatttttcaacctacatccaaattgtatcaggataatctttcatttcactttcaaaaaacgagcagaagtcttacagaattgtaagatttctgctcacttaaaatttaaccaacatatgattagcgcctattaggaaaacacactgtcaaaggggttcgtagcgggggttagcccgctactgcggtatcttccgtagtgttgatttcaatgtattcggcaatcttgcggagttcgtcagcaaatttgaatttcacgctgatattgccgttttcatagaccttgatatagtccacaagttcaaccaagatttcacggttgagggcttcaatgttctgatacttcataaaggctaccagtgcaggatgctcgttgtccacaccgtttgccagttctgcgcgttcagcgttcagccgggtaagcaccgcggaaatatcagaagtctgccgttcatagtcagccttcatatcccggtattcctgctgggtgatttcaccgtctttccagtcctgataaagagattgcttgtagcgtgttatctttgtcagttcccgctcttttgcagctatcagatcgtccagtcggtaagactggctttttttgattggagcggaattgatctgcgtgacgatttccgagtaggaaacagccaaatgtacctgatgctgtacagcgaacaaaacagcagcctccagccgttcatgcttgattgagtgcatggtgcaggctgtccgggaacggttcttgtaggttgagcaagaataatatacattgttgttcttgccaacgcatcgggtaatggcccgcccgcaatcggcacatttcagaaagccgctgaataaatgtacctcacggcctttcggggaagtacgggtatcacgctgtaagagagcctgtaccttgtcgaaagtttcatagtcgataatggcctcatgcgttccagccacttccacccattcctcgcgtggaacagcttcaatctggtgtaccttgtagcttttcacccggcttcggccttgggctaaatccccggtgtaggtcggattggtaagaatggagtggatcatgcggactccccacataggatcgtcataccctcttgtcgaaacaggcaagcccttttgtaccttgtaagccgaggggctcggtacgccgtgttcgttcaggtacagcgcgatagcacgttttgatgacccttgaataagcattgtgaaaatgagtttgacattttcagcagcatcgggatcaacaatcagcctgtgcttgtcctttgggtgctttacatagccgtaaggagcaaatgctccgatatactggccgttgcgccgtttgtaatcaaatacctgccggatctttttggaagtctgatagcagtaattatcgttcatcacgtttgtaatgggaacgatgatatttgaaacgctgtcggggttcttgtagctgtccacattctcagcaaggctaataaagcgaacacccatttgaacaaacaggttatcgatcaaacttccggcatcgctataatttcgtgcgaagcgggacaggtcttttactataacgcagttgattttaccactcatgacatccgccaagagccgttgaaaatcttcacggttggcgtccgttccagtatgaccatcatccacatattccgtgatgctttcaaactcgtcaatgttgcgtcggtaaaaatcgttcagtaggtcacgctggttctttacgctgttgctatcgtcttttccttttttcaaatcttcctttgaaagccggatatagatgcccagccgccagcggcggattgtgtaagagggagagaaactctgctgataccctctgttttttgctcgtgccattgttcctccttccctatcacattacacttatattataactctgtccggggaggacaacaaggatgcctccacttcgggacactttgtctcgaagaagcaaaacgagctgtaaccgaagttacagcccgcttctttgccgcagcaggaaatccgtcagcttatcttggagagatggcccgctttcagcaaattcaattttcacgccaacaccaccgatgcaaaagcagtatggatttttgacagtctgcaaaaatcgagagatgcgctcctttcgggaaagcgcattgtcaaaggtcataccgctcacatcaggcagggactcggcagccaccgcgccaatgtcaacgcttctcatttgttcaagttcctgtgtagttaatttcacggtaaacctccttcgcagattgatagaacgcctcccgctgtttggtggggaaacgcaacaggccagcaccaccgggatgctggcctgttgccttactccaccttgggacactttggagccgttgacaaacgcctattttgaaaaaaggctttgatttttctgcccggtctttgtcgattttatggcagaaacggctttttcctgaacttttttcaagacggtttttttagaaaaccactttgtctcgaggtttattatagtttttgaatattagagagtgccgcacatatttacttggcctgtccaaagacaatcgttattttctgtgcggcgctctcaacgcaagtaaagcgacaagcccggaggaacaggcagccaacctgttcagcaccggatcatggccttgggatggccgggcccatttacagtgttggtgttgttcgctcaatctcttttgggaaatgtcaccgcgcacccaccgtctggctccacgtacttactcagggttgccgttattcccttgcgttaggaagaaaacctcctctcataaaccgagacattttttcatcaattccaagtgggttaagaagaaaaaatcaaaaagtttttttcatgcgttcaaggccacgcttgatcgactggcgaatagactcctcatgtacgccctcggcctcggcaatttccttaatcgacttgccaagaatgatatgtgcgtcaattctacggccttggatctccggcagagaattgagagcgttccacagacgaagaaaggtttccatccgttcaaggagctcctgcggggtcggctcatgcaggcaagcggaatactcaatcccgtcatcgcagtccagagaatactgcgccttgtgccgggagagccgccgctggtaggccatttcataacgggcatcggccttgaatacctcggcaacctcgtcagaaacttcgataagctgatcctgcgtgtaccaataataaagatctttcagattgatagtagtcatcgtaaaatcctccatttcagtttgttcggggttggtcggaaacgaaatggagtaatggcggagaacggcaccgcacctcgggacactttgtctcgaagtctggaaagcaaaatacgcctgcgcgacacaaggccacacaagcgcacgaaaatatattatcggttatgtactgtttaatttcacattcaaagccggactgcttcgatggaggggctatgctttttttaactggtgcagatcatggatactgcgaaaaagagaaaaggacacggaaaataacctccaatcggctaccgtgtccctgcaagtcgtcattggtttgtgtagacgcaaagaaacggcggctctgaaaatcaaagccgccgtttcaaatgggcgtgtcaaattgtctgctctacgacggctttttttcttttgccgtcgtgcggcagatcatttcaatattcggttgaagtatcgttattcggtgttaagttctactaatacaacctctggacgattattaaatcggaatggaataatactatttccaaggccgcggctaacaaccatatttgtctttccgtttgtataaaggccggaatcatatttaggaaacagcccttgattgggggcaacgagccccccaataaaaggtaatcgaaactgccctccgtgtgcatgaccacataaaaccaaatcaacaccacagcatacataggtttcaaataactctggccgatgtgatagcagtatagtgtaactgttttcgtcatcaataaggctattcaattttgtgttgaccatggctggcgcttcattaaacatatcgcccttaatcgtaaagtcagaatcagaaagcccgataagggtaatcatttcgttgttatgcactaactgtattgcttcatcttcaaggacagttacgccagacgcttcaagccctgttttgaattgatcataatgtgagaagttagcttcgtggtttccagttacaaagtagacaggggctatttgaacagcttgttttataaaatcaaacgcaatctcaatgtctgtatgtccagcatcgattaaatctccagttatcacaataatatccggttcgtgttcagacagcaattctatcaattctgtattgctttctccaaattcagcattatgcaagtcggacacttgtgcaatccgaaaattagaaaaggcagatgctatgcgatcgctggagatattaaccatacttaccatcaatgctgaattgccccatatagtatagattatcaaaaccagcagtatagttgttaatacacaaatcttcaccaatactctggtggaaaggatttttttcattttttcctctctttcatcaacttaattataaaaaaatcagcttacaaacaggtgaatttcaacttacgaatttgtaagacaaaagtgggcggcttctaaagccacccgcttcaaaagtagaattactgtgcgctgattgtatcaacaatggacatattgcgtattctcttgattggcccatacacagccagaattacagagcttacgacaatcaacagaataacagctacctctggtaatggaggagtccaagcatccccccatctataacttatcaacattccaaacaatagcttgttacaaaacagtcccaacaccgtaccaactacaccgccgattatggtataggtgaaggcttctgcaacaatcattttacttagctgtcccatgctaacgccgatagcacggaaagcgccatactgtttcaaccgtgcagacacactcatggaaatactattgattatgttaaaaattgtaatcattgcaattaggacgaggaatccatagatgaacagccaaaaacaatagtaagttcccatggtactgctgttacccatgcgttcatcagcgaaagtaaatgaggaatctaccatttggcggatcacataaacatcttcgtctgttgtgcctttcactaactgcacatcaataaccgtatatttcgactcgccagtaatttgttcaaatgtatcctctgaacaaataattgttccaacaccggcggcactgtaaaacggacagtcggacaacattcccacgatttggatttctttactttgtccgtttgtattcaacgatacagtatcgcctatttgtattgtgttctgcgaattataaacaattaagcccgtccctaaatcagtttgcacagattccagagaaccctctaataaatagtcctttgcccaatcaaattgatactgctcataagagattaaatccatctttttttcaataccgtttgtgacagacggaacctcgtatgcaaattttcttccatacgctaaatccacaacaggattttcctttagatcatcaagtaatgctttgtcaatagcacaggcgttatcagggcttatgatagataaatctgctgtccaaggttggagcggtgttaaggtatgctgcatgaactcaactgttacagagaatgaaaggaaaaggataatactgagagcaaatgagcttgtcatcaaaaacagatttttccgatttgcttttgcatgataaattccaagtgctgtatcaatcttaagcagttgtgtattagcagcatttcttgcaggctccaagtcgtttgcattaccggaaaccgctgccaacggagatacttttgctgctttctttgccggagaataggcagcgaacaaaaccgttaccaagcccacaacgattcctgcaagaatacttggtacgctaaatccgaatgtagacatcgctttgaaaaattccggacttaggaaacgcaaaatcgcacataagacccaaatgacaactataccgatggaaatacccacagggattgccaaacggcaccaactaagcgcctctttccgtactaagcgcataatctgttttggtgttgcaccgatacagcgcataaggccgaaaaattcggtacgctgggctacattgctgttcaggctgcttgcaatcatcataataccagctaacattaccagtacaaacaatacagccgcagccaagtaaacctgtaacaaaaagggaacgcggctttgtccaagcaatccaagcagattgttgttggaagatatttgttcattcgataaattgcattgttctttcaaatctgcaattttcccttgtatatttcttgtgtttgcaaattgagtaaaaaacataatgccgtaatcattcggctccccgtctgatacattcggataaatcgcgcagtaatcctctgtgttcaaaatgatgccgtaggagtcgccactcatgatcgaggcggtattattcataaatcctgatatggtaaaattcagtttatcgccatcaggagtttctacggcaatgggatcaccaatcgcaacacccattatctgctttgcattttcagtcaccaacgcttcattacttgtctgtggaaaaacaccttcttcaagttggtcagtccagatttcagttatatagctttcatcacaaccgcatatcgctacatcttttccgcccaaagtgtagcctaaatctccacgataattgagtacgccatacggtgaaaatacttcaatatcagggcgtgaagcaataattgctgcttcttcattgctgatattcttaatggcaatatgccaattcccagactcctgctgtgcctgcaaaatctggctgcggatgaacatatctgccattccaaaaatagttgtaaccagaaataccgccagcacaatgcagaaaatagacattctgctttgcttcttgtggatttttgcggatatgggaacaaggtcaagataatgcttcatttgtttttcctcccaaatccgtcaaaacgccatctgatacccggaacacccgatcaacggatgcagtcaaatccttattgtgggtaatcatcaggattgtttgctgatagcgacgggacgcctgcgtaagcagggcgataacatcctgactattcttgctgtccagattgccagtaggttcatctgccagaatcagtttgggctttgtgattaacgcccggccaatggcaacacgctgctgctgtccgccggatagttggctcggcaggtgatgtcgacgctcggtaagtcccaagagttccaaaatttcttctactgctgccgggtctggtttgcgatagtccaaaagaagcggaaacatgatattctgctccacattcagctcggaaaccaactgaaaggattggaagataaagccgatattacgacggcggaaaatcgtgcgctgttcctctttcatggaaaacaggtcttgttcatcaatccaaatgtggccggaagtaggggtatccaaagctccaatacagttcagtaatgtgcttttgccagaaccggattcacccacaacggcagcaaattcgcctttatccagggagaaggaaaccttcttcaacgcttcgactttcgcctcacccttgccataagttttacataaatcttgtactttcaatatttccatagtcatcattacctcctttctcaaaaggatagcaaaaacagcttacaagcaggtgaatttgaccttacagatccgtaaggaaagatagtgtaaacagcgtaccttttccgacttcactttgtacggagataacaccgttttgaccctcaataatggacttggcaaggggaagccccagcccgattccttgtgtatcaagggaatgtttgctgcgataaaagcgtttaaagatatggtaaatatcttccgggactatgccgttaccattatcagaaataaaaatccgaaacatagcaggagtgcgctcccatgtaatacggacaataccgccagcttgcgtgtgatccagtgcattttttacaatgtttccaatcgcttcacctgtccattccatgtcacaaataagctgctgttcaccatcgccatctatctgaatctgcttgctttcgcttttagccctggtggttaggtcattgactgaatgagctatcagctcggacacacggcaactttttttctcaaaaatgatgtttcccgtatccagtcgggttatcttcaacatggataagattaactgctccatacgctttagagaaatacccatcttcgccgcaaactgtttgaccgtttctgcattttctggctcactttcaatgatctcctgatacatagtgagggctgccagaggcgttttgagctggtgagatatatcggatatggtgtctttcaaaaactcttttgctttacgttctgtttcatttttggattggagcatagttgcaagctgttctatcgaagaaaacacttggtagatagccccctcataattctgcggtaaatgacaagagtaatccccgttgatgtaatttagcaatattctgtcgacctgttgatacaatcgcttccttttccagaaaaaaataaatattcctatggcaagcacaaagagaaaaaatagcacagtgcatagcatggtgcagaaagcggaacgctgaaattgattgaaataaggccgcatactgctttctgactgttttcccaaacccgcagccgctaataatgacctaccatcgtcactgatgtctgtgttcgtaaaggcaactgcaaccacttctttcggaacaccctgttccaaaagtgaggatgaaaccgcttcatcatgtttgatccataggacttccgcatcgttcacctgataaatagtcaaaacggttgctgtacctacaaacagcagagcaaacaaagtcaaaaatagcaggaaccctttaatctgtctatcttggtacaaactcatatagacacctctttccattggtagccgaacccacgaatggttataaggtgttctggatgggacggattggtttccactttttcacgaagccgccgtacatagacggacagggtattatcatcaacaaaatttcctgtatcatcccacagctcatttagaatgatgtcccttgtcacaacgcgatttgcgtttcttaccagcagacaaagcaaacgatattcggcgcttgtcaaatccaatgcttttccctttaaggttgcacgactacccaacagatcaatggtaatgtcgccacattccatagaagtgtttttttcgcttttggaaactccggcccgacgcaacagcgcccggatgcgggaacacaattcccccagtttgaaaggcttggtgatataatcgtccccaccgctatctaatccacgaattatgctgacttcttcatccgatgcagtcaggaatataatcggtatctgctgattttcttttcttactctttcgcatacgtcaaatcctgttccatctggcagagtaacatccaaaatcaataaatcgtatcggtcgagttcggataagtattgttttgcttcacatactgtacgggcaacttcaacatcaaattcattctttttcaaagagtagaccaagccatctattagactgacatcatcctccaatagcaatattctattcatgttttaattcctttccttgttttgtccttccgtcaatcggcttttctgcgttctttgggatcagccaaataccagccatcttcacagcgccgggaatacgcccggcagcacaatagtaatttactctacgaggtgtcacgccccatttttcggcggcctcttttagtgtcatataatccattctgcacctccatagagtatattatagttcttcgactcgaacaatacaagttttggaagaaaagaatgtgaaattaaatagtcagtagcatgaaatacataatcgttcaaataatatcacatgaaatgtaaaatcatatcaggtgatgttatgaagatagaacgagatgaaagacgctttgattttcacgatatagggctcgccatcaagcgtgcaagagaagccagcggcatgacacaggagcaactggcctatattgttgaccgcgctccgcgtaccattatgtataatgaaaatgatggtcagcatccaagcttcaacaccttttatcagatggtcacaatgtttgatatatcggtggatcaatacttttacccgtcccagaatagcgggagcgagtgcaggaagcggattgatgccatgttgaacgctttggacgaaagagaattgaaaatcgttgaagctacaatccaagcgatgaaagcatcgaaagaaacggaggaaacgtaaaagaaagcgtaacctccgttttttgcgccatgttgcgggttgcgcgttttggcaagcaattcgggtgtggccacactccgaaatttttgcagggcgcagggcccgcaaaaatgcttgttggggagctccccaaacccgctgtacttcgggacaaattgtcccaaagtcccggtgcgctgcaccgtagtctgcggcccgtcactatcgttcctgtgccttattctcacgctcgtccgttatgccgagcagatgatcaatgttcgcttttattgccacggcctcccgcatttgccgctgggcatcccggtattctgcataaagctctttcttttgtcccgccagctcacggcgggatttttttagtgcttcaatcttagggagctttgcgccgttcagtatggtgttcatggtatcctttgccgcccggtaagtggcaagctccacttcatgctgggccagatactttttgctgtaccgcgcagccttgtacccatcgaacaccgggcgggtcttggcatagtccaccgtggccgccatcagctccgaggttttggaaagggcctcctccgttgtgcggagctcgtcagacagcttgtgaaagtgatccacagcagcctcggtgcgggccgtcagcgccgcatagtctgtcagatgatgctcctgcaaatactggagcgcggcggccatttgttttaggttgtagaccttggcccatcgttcataggccgggcccttgccttgggccatacgctcttgaatgtcgatgatgagattaactcgccgtggcggaaccgtgggctcctcgggcagttcggggagtggacgttccccggcaattaccgccttgatgtcctccgggtcaaatccaactccaagtgtagaagcccggagccgggtcggtttttcctgcccggatgcaaggaatgagatgacaccgccccgcccatgtttcaccgcaaagccggactcctccatgagacgaagaaagtcggcaaagtccgtgggctttttctccaaagcggcgagaacagccagccgcacccgctgcttggcagagggtggcttttctccgatccactgtccatagtggagaaaacgacccttgctgtgctggcacggattttggataacagacaattcatgttcgatgcacacgcggtcagagagccgccgcagggcaaaggacgaaccaatgaaattatgaaatttccgggagcggtcaaaggccgtcgcattgaaataaatgtgattgtggatatgggccttgtcggtatgcgtacagacgaagaactgatactttccctttgtccagcgcatcgccgtttcatagccgatacggtttgcttcttccgccgtaacctccccgggcaggaacgcctgccggatctgaaagaacagggccccgcgagacacggcccggcctgtctctgcaaggtattgactttttaccagaagaaactcggcgggagccgtgttcggatcgcagagataggaagatacggctcccagcttttccgggttcaggccataggtgaaacgatcctccatcgtttgaattgcactttttcccgccgctgttttataagggcggatgtaggtggtcgccgtaaaaatccctccttccggcaaacagtatttttactttgggacactttgtcccgaagtagaaaaagccggggagcggtatcaaccactccccggatgagtcagagctctaccagcgcggagagctgtttcaagagatcagacagcggcccccacaaagcggcatagtcccgctgtaaggctgcgagttcttcgggataaatcgcgccgtaggtgttggcttgaattgccacttggttcagattgttggagcagcgccgctggagcgaaaccagctcacgaacaggcgaaaggtcaacatgaagcacatacccactcagggccattttccgcatataggctcccatattacggatgccagcctccgccatacgttcttgaatcagagcctgctccgcctccgacaccatcacatgaagatggatcggacggcggcgcttttttgtcatcgctcctcacgctcccggctgcggcaggcgcggggcggctcctttaccttatccagcggcttttcctgttcgtctgccggaacagggtgcggcaaatgaaattcacggtgcaggcgcagcacctccagtacagacaattcctgttcacgtttcttttccatatacgcacctccttatctatcgccacggtcaggctgcctccgttggggagccggagcctccgagccgcgatctgcctccgccaactttgccgcatttttcatctgctcggcaatcggacggggcctgtcgggattatcaggcgcaggacgcagctcatagtcggatgcctgtttttccgttagcgggcgggtataggtaagatagccccaagccaggaacgagccattttccaccgggatgcgctgatcgtaattgaagatttcatccggcttgttataaggcggcttcgggaatgtcccgatgtccacaggccgctgggtcgaataatacttgtaaaggccgggagcctcggtctgcctgatccccacgttataaatacgctgatagtcctgcacccggtctgcaaaatcctgttccatcgcggtgcggtcatttccatagtgaccccattcgtactgccgctggccgtccttgtcatcatagcaggcccatgtgacatagcgggatggcgcggtgggatgttcgcccaatgcaaatccccgcccattttccagcatgaccgccttcaaaatagcatagccttgatttttgtccatagtacacctcccatcatcgagacatttctttgttttctcttttcacaaacggctggagctgataggggcttgtaccgtcctcgggtcgcagaaagtctatccgggccgcagcacggatggcgttctggttaagctgccgctgccatgccccttggctgggagcccacttaaagccgttgcttttcagttcctgccgctgatcggcatcgggcttttcctcaaaaataagctgcaaacggttttcagcctcgttgattttggcctcacctccggggaatgtccagccagcaaactcggagcggctgctcagttcctcaatgcgctggcgtacacggcggatgttggcgttgttgttggaaagcagataggcggggtacggcttacttttgtccaagtgccatgactgcgccatatctgctttgagcttttctgcctgctccggcgtaagctccgggcaaccgtccagcgttttgtgtttccgaaaatacgcattgacctccttcatggtggtctgctgggactccagcccctccagcttttttgtcagtttttccacggcaagatcatcgtctgcgctgatcccacccataccaacagagcggattttatcaagcagctttgaaatctccgcacactctccatagttgcgatcccgggcggcgttctgcttgtgcttttttgccacaggaaaattgccgcccccggagatcagaatagagggcacccgggcatcaatcacattgcgttcattcagattttccgcaagtttccgggcatagcgatccaccagagcgtcaatcttatcgtggtacatgggatcgacacgcgctttctggcgttccgccgctgcatacgcttcatcgaccattgcccggtagcccgccgtagcggagcccggctgatagtcagaaaagctgttcatatcttttgcccgctttgcggcttcttcattgatcggataatatttcggcatagtacctccttccacaaaagccggaactttgggacaatttgtcccaaagctccggcagctaaaatgttgacagcatctcacggaaacaggggcggacgtagaaacatacgcctcccgcagaaaagggccttaaaaagccttgtcacaggcgggtttggggtgtcctaattgtcaacacatcagccccgcttttttcgcatatattcccgctgctgtctgcggtgtgccgcctttgcacaggccgccgaacaataggtttgccgtccatcagaagccacggctctgccgcataccgggcaagccttgaaatccggccttggcccttctgccagcagcgcagcctccagcgccggatcaaggggcagaactgcctcgcggaagtagcggcaataagcccccgtccagcatttcccaaacatatagcactcgcaatccagcggcaggcagccgcagtcccggtcatagttggcacaccattttgataccagcctgcggattgccgttttttctgtccgggtcagttctcggcccacagcatcacctcccgttgcccggtggttttagttgctcccggtagcagaacacgcagccgatcccgcgccagtaagggcagccgtcacaacggaagcccttcggcggcaggctgggcggcacacccttaaagtagcttttttctttcataaatccctcataggggttgttggtaaatctcattcattatcctcgctttcggtatcgtcctcgtcccaaggcggcccatcgtcctcgggatcgtcataatcagccagttcctcgctgtaatcctcttcgggtacagcagctttttcatgcttcgggcggtaaattttgaagtaccagcctgcaccgctgcccagaacagccacagccaaaatcagcagaagcgtcccggtattacttttctgctggggctcgggttccggctcctccgcaggttccgtcaccggagcgggttcgggagctgtgccagcacactcggtcatattgaccgcgcagacctcgcaatccgtatggatggctccgggcgcacatttttctgtgcaggagcaggccggaagttctccgccagcggcctccagtgccgccagcagatcggcttcatccaccatgttcaaaaagtaggtgtgatactgttcgccgtcctcgtccacgggcttgtcatagtcaatgacaatgtaaaaggtgttgccgccgctggtttccaccgtgatgaactgtttgttggttgcggcatcgtagagcagatcgcgggtcacaaggtttccatcctccgaaaagccctcgcccggggtaatggtaggcgctggctccggggccggagtttcttccacaacaggcggttcctcattcccgccgtccgaataggcataggccgggattgcaaagccgcataaaagaacggcggagcaaagccccgccgccaacatacgaaagtgtttcatattcagttttcctccttcttttcttcttcggacttcgggacactttgtcccaaagtacctccgtccttcagcttttcaaacagcagcgggagctccgtaagggaaatgctcataccgcgcacaatgtccacgatctcgctgttttccgcctccagctttttttgctccagctccttgagccgggcctgctgttcactgattttggccttgaccttatcaatctcggcctgaattttcatgcttttggtagttgccatttcaaaacctcctgtcacggtaaacgcccgtaggcgtaaaaatgagattgccagtagcttgtattcaaatttgcgtagccgatgggatctccgcaatgcagcattttcccgtcaccgacataaatcccgcaatggctcacgcccggcgtgtcataggtgcctttgaagaacaccagatcaccgggtttgggagagctggtcggcgtacagatgttataaagcccctgggctcccagcctgccaacattccagccggagtgattgatgacccatgaaacatagcccgagcaatcaaaggaagtagccggagaactgcctccccacacatagggatagccgatgtatttctgcgcttcggcaagcatcgcggcaaaggcttcatcgtccagatattctccgggcacttcgtagtcaccgggtttcccagtaatgtacttgttcacatagggagaatccgggaacagatcggggcggtttcccagcgttgccatatagatggcataccgggaaagctgatcctcgcccatgacatacacaggcacatgggataaatcaaagttctccagcgtgaccgtacagatgtaatagtcgtaaggcacctgataggtgtccgtatgggagttgccgtcctcgtccgtccatgtgtcggtttctgtgcgataccgggtttccaccaccacatcctccgtgagaatgtactggcggtcaaacagcatttgcagcgttccctgtacctcgcctattgtccattgtccctcatggagcgcacacaaaagagaaagcagcacatagggatcatgttcgatttcgtccagatcgaagtggtattcgtcatagtcatgggtgctttcataggtgtccagataatgctgtaaatcatcttccagcgcacaataggcggcttcggcggccagcatatcccgatcctcgcaaggataggtgctggctcctaatgcaccggccccggcgttccccagcataagcatggtagaggaacaggactgcatagcaaacaggagtaacacacagagcaccgcaatcacggcacctgcgggatgacttttgacaaattccactgcccgggcagtcaggcgttctgtggctgtggcagttttcccagccgcagccgcgctctgctttgcagcctcctttgcctgcttgcggtattgcctgcggagccgttgcttctgccagtagcgggtaagggcatttttcgtcagctccgggtgctcctgtgcggcggtgtgaaaatggtagtccgccgtgtacttggtatagcgggcctcggccttgcgtaccacttttgccggatgttcccggactttacggcgcacaaagcgagagccatgccgtagcgcggtttctcccacaagctcagaacggtgtgcgccttccgtgccgacattttcctgttccacttcaaaaatcttgccatgcacgaagctgtgaacggaaccgctggcaacacggcctatgcgttttaccgggccgggctttttcggcggcttttgctttgccagcttctcccgggcctgttccagtttttcgccttgggactccatgtggagctttgccgccgcagcctgttcctgctggctctttttgcggaacttggacttcgggacactttgtcccgaagtgtcggaagcctccggcccgggctgttccccgtcaggggcgtgggcggtctgcgaccaagcctcctccttggccttattcgtttttcgtttcattcttcatatcctccgggcgggtagtcagcaggtcatagatttctccgcgagggaaccgatccacaaacggaatggttacatttccatagaacaacagcccctcgccggaattgctgtgtgtgatataggaaagctggtgctcggaaataccgagctgttttgccagaatggtacggtcactctgcgcctgcgaaagcagaatcataaaatccgtgttgtccagaatgttctcgatttcacggcttgccaaaaggtctttgacgttctgcgtcaaagcagacggcacacatccttttttacgcagcattttccagaccgccacaaagtagctggctgtcagtggatcacggagcagaatgtgaaactcgtcaaagtagcaccaagttgccgcgccctcgtggaagttctgatccaccgcctgcgaaacaaactcgtttgtgatgtgcattgcaatctttctaaggttttcgcccatgtttttcagaacgatgcacaccacacggctgtccgtcttgacgttggtaggatggttaaaaagattgagggagcctgtacaataaagctctaaggcagttgccacgcgccgggcctcgggctccggctggcgtaagagctcttcgtacaaatcctgcaacagcggcgtttttgcggtttccaatccgagcgcctgctcccggtacaccaaacgcacacagcggtcaatgaccgtcttttcaatgggctgcaagccttccttgccgccgaccaccagctcgcacagggacaaaagaaaatccgccttcatggaaagcgggctttctccggcagccatattgagctccacatccatcggattgagatggtgcgggctgtccggggcaatctcgatcacctgaccgcccagccttcgcaccagcggcgcgtattcgcccatcgggtcaaccacgatgatccgatcctgcgggatggtgagaaacacattcaagagctcgcgctttgcggcaaagctctttccggagcccgtagagcccaagtacatcccgtttgccgatttcagctttttgcggtcagccatgatgacattgtgagaaagtgcgttcatgccatagtagagggcctgtccagccatgcggagctcccttgtcataaaggggataaaaatggctgtggagctggttgtcataccgcgctggatttctacctcgttgtagccaagggccagcgaagaaacaaagccctgttcctgttgccagtccagacgacgcagagcgcagttgtatttctgcgcgatgccgcccacggtaaacacatcgttttccagccgctggcgagtaggggcaaggtttaccaccgtaaaggtcagcagaaacattcgctcattgcgggattgcaaatcagccagaagctccgccgcgtccttgctgaatgtaatcaggtcagggggaagaatgtccgggtcatagccggagcgcacagcctttctctgttcctccactttcattttcccaatgtccgagattttccccttgatggtcttgattgccttgagctgatccacggtctgaatgtgcatggtcacggtcatttccgcatccagctccaagatttccgccagcagcttatccgaaagctccgatgccataatctgcaagtaggacaccgcgccccaatactggccgatacggaatgtgcgggactggcggaagtcgagactgtccggggcaataaagtcttttgtgccaagcccggtctgcgggatgtctttccacgaaaagcggaacggctcgcggctccccggatgcatctggctatgaagcagcgcaaggcgggcccgcccgtccatcggctccgagggaacgcccagccgcttaaagtttcccatgacatcggcctccacacgctccagacggggccgtgcctccgcaatcccctcggcgggtatgccaaaggtgatgtattttgagcgttcaatgccgttattgcttttggcaatctgatttttcagcatcccggtaaactcgtccctgacgctgttatagttgtcatccgctttcgggatattgacttgatagcggctgcgggaatgggaacggcggttgataaaggaaagctggaacggcagcgaactgtcaaagtagttgaggaatgagctccatccgctgaatatggcagtctgatcctcggtggatgccacggagtaattgatgtcctcatattccacggtttttgtatagagcccgcccgggagcttgcacacaccgtccgggtgcatggacagatacgggattgtctgctgggcagacagggccgcccggcctttacccttggcggctccgtttttcttctttgtgtttttcaatcacatcctcctttccagcgcccggcccggcaaagggcgcataaatgttttcggttcggtaggccctgatccccggccttagaaacttggcccggatgatgtttcgcacaaccttttcaaagggcaagccgtccttttcatacatcgccagcaggaacgccgggagcataattcccagcatgagaaacatcgccccggtattgccgagggtgccacgggttagcagataggccggaatccccactgcgcccgcgctgccgaagcagacaagctggcgtttggtgaggttgaaagccatctttgttttgattttggataaatcgtttggtacgtttacatagggcatagatcacactcctttctgtacttcgggacaatgtgtcccaaagtccgggatggttggtgttacttcatttccccatacagcccagccgggcggggtctgcctggcaaagagctccacgcggggcagatcgcccatcagggaaatgattttggcgcgggcctcgtccggctttttgctatgggcttcaatcggggaaatgatgaattgatgaatgttggcagcctgccgctttggatgtcccttggttgccagcaggcagatttctgcattgccccttgtccagaagccaaggccgtaaaaccagctatccgccttcttgttctttttcagccagacgaaagcaacgcttttgtaggtgaagccccaagcctcgatcagccggagcgcctccgggagctgcgggaaagtagcccataaaaagagtgcgctgtccggggctgcaagatcagccacaggcaacgcacataaatcctcaatgctcatagtgggataatgattttccgccgcgccctgtactttcttagccgagtagcgccaagggggatcggcgtaaatgatagaatactgctggataattacactcctttctcgccggagctttttactgcctgcgccgcacggatgcgctcactggcagcggcataaaaggccggggccgtttcaaagcatacaaagcggcgttctgtgttgatagctgcaatcgcggttgtgccggagcccgcacaaatgtccgcgaccagttctccggggcgggtataggtgcggatcagatattcgcagagctccacgggcttctgcgtggggtggatgccgccggacaccgtaggcacaaaaagtacatttccgggatagcggcggccatcgttggactccgatccctgccgttcaaatttcccatagttggagcttgtaccgcttcgggaatgaacgcgggcataaggcttgccataagtaaactgcggattgtagaccggggacttctggtaaaacaccaagatattctcggactttttcagtggagcccggtttgcattgagaaagcccgttccgcgctccttgtaccaaatccactcatagcggagcatggcgaggttggatgcgcccagcaccttgtcaaaggggcactgtgcgaaaaacagcactgcgccattcggtttgactgcccatttcaccgcctcccacagctccgggagcggcaggggcacatcccaataattccgggttgtgccgtagggcggatcagtcagcagcatatccacgctatgttttggcaaagaacgcaagccctcgatgccgtccatgagaaacaagccctccttcgggacacgttgtcccaaagtgcggctatcggtcattgcgggcctcctttgctttggcaggtgcaggccgggcggcattttcttttccagcttgtttcgcggcctcggccatctgctccttgatcggggcaggccgtaccgcctgggcccgtgcaacaagctgttccaccgccgcatgatacgccttcacaccagccgcgttaatccgctcctgtgtggcgtggtcaggaatccgaaccgtagcccggtatcccgtccggctggcaggatcgggtttagagggagctccgagaaaaattccgtttttcccgtccacaaccttaaaatcgtcgatgaccacaccgccaaaattgacgctggcgaagccgatcagttttccctgcggctcaatcgggcggacagataccgtgatcggaacaaccgcctcctgcaagacagcatctgtccgcatttttactgcctcatcaatgctaacgcccttgacttctgcaagctccgcgatgggagcatcaaacagccagcgccgttcctccgcagcaatctgctccggggtcagcaatacatcgtctttcttactcagataaaattcctcctttccgcttgccggagcaggctgggcggggtcgtccatcagctcttttctttgcaggacggcctctggttccgccataaagcggtaagcgtctgcctcagtaaactcctccggcgtttttccgttccataagcgcgttccgtctgccccgtatcttctcggcataaacaccacctcctgttaatgagcgccaaagatacgctgggcaatgctcccggtcttaaagagcatgaagcaaagcagaaccgtgtagcccacagttccccaaatcgccccaatgggatcgccgcctgttgcgatgccttgaatgagcactgcgtaaattgcaacacatacaagaatcagcagcccttgaaagcccacggcaaacagggacttgatgtagttttgcccggtgctgccaagctcccggttggaaagcgtagcaacggggatgggggccagactggtcagcagatagatttccagcatcctgccatacaccaaaacgaaaatgataatccccatcgccttcatcgtaaatccaatgagcgcagactgcagccaaagccccaaaagcggccccaagtccatcgcctccagcgaggtttccagttcggcaagcatatccgccgaaacatcggtagagccttgaatcagcccgcctgcctgcgcgataacgctctgcgatacatcgaacacggccatgacgatattgaatgtgtttgacaggattaagattgcacaggccgttttgaacatccatttatagaggttcgcaacgtcaacctcgtgcatattgttcttttccaaaagcatctgtatgagctcataagtggcaacaaaggtcagcaccattccggcaatcggcaggatcaccgtttcggaaagctgtcggatcagggagaaaaccccggcgtgccacgccgccggggtagtccctacctgtgccgcaatctctccgacttgggtattgacggtatcaaaaagcccttcgaggtttcccatgatcccgccaatcagaagctctttgagccagtttgtgagccagtcggtgagaaaatccataagcgcctaccttaaaacaggccagacagcagagggatcagtgtggtgccaatgacgatgatgccgccgcccgccatgagctgttttattcccaattaggtgtaaaactctgctcgatggcgggcggcggcgtacaaaaaatctatatggtgtttttaagagaaccgtcccggcgggacaggtcaggcagtgacctgttccacctccggaatgggtttgagattaaaatgaatttcgatagaaatgtgtcttgttttatcttcgtcaatgcgctcatgcacgacgatttctttgattaagcggttgagggtggctgcgtccagctctgtgatattggcgtattcctgaatggcttccacccattgttttgcgtcattggcaagctggacttcatcggacagccgctttctgccctcggacacttttgctttaagctccgcttgctcggtctgtgtcttttccagcatggtgttgaaattctgctcactgatacgccctgcaatcatatcctcataaagccgcatgaccattttgtccagaacctcaatccgttcctcgtcccttgtaagggagcgttccattgcttcccgctgttcccgctgctcggcttcacaggtattggtcaggcggtcagcaaccgcttccccgtccatcagggcagctctggcacattcccggattttccgcagcacatggctgtaaagggtgtcatagtcaatccggtgctgggtgcagtggttctttccaaaggcattgtaggtcttgcaggagtaaatccgctggggatgttttgcgtttgtgtagcgtatcgtcagcgacttcccacactcgccgcattttatcagtccggcaaacaggctgatttcattggtctgccccggacgctggcgggatttcagcttgttctgcacaatatcaaagctcatgcggtcaatcagcggttcgtgctgtccctcaaccacaacccagtcctccggtttcttttccccaatcgtgccgattttgaaacggtagtcctttttctgggaagcaatcgccccggtgtagacgggattcatcaaaaggtctttgataacggagaagtcccacatataccgcccgttttccgggtctttcttttcccatttggtgcgggtattgcgaagcccccgttcccggttccaccatgtggggcaggggattttttcttcctccagccgtctgcggatatagttcggaccatgaccgtttagggcatatccgaaaatcagccgcacaatcggggcggtttcctcgtcaatgagcagatggtttttgtcctccgggtctttccgatacccgaacggggcaagacacccggtaaactgtcctttctgcgctttcagaagataagaggaatggactttcttggaaatatccttgctgtacatctcgttcaggatattcttgaacggggcaatatcgttgttatcacgcagggtgtcgataccgtcattcatggcgatatagcggacaccgtttcttgggaaaaagtcctcaatcaaatgcccggtttgcagatagttacgccccagtcggctgaggtctttcgtgatgacaaggttgatttgcctgcgctcaatggctctcaacattctctgtaaatcaggacgctccatattaagacctgtgaagccatcgtcctgatagactgccacaacctcccatccctgcttttcgcagtatttttccagcatatcacgctggtttgcgatactggcactttcgccttgcaggtcatcgtcctttgacagcctgcaatagaccgctgcacgataccctccggcaagtgccgaaccgattgttctgtattccatttcgttcatcatagccatttacccacacaatccagacggtatctggctcttttgaacctcatcttcattatagctcatatctttccttttagcaagatattctttcgtatttgtcttaccgtatttctgggaaatcaggctgacgaacacatcggttgcgtccagctccccgtcaaacaccgttgtaacatgaatctctgttttgttttttgccataggcagttatcctccatacatgaaaatagccagacagagggtgtcggcaacgaagtccggcaacgggcttcaaaagaccttgcaaacaatctcaatctggcgatggttactatttatacttttcttttatttttctgttgttttggttgtcataggggagaaaagccgatagtttcgggattttccccggcaaccggctcggcaacgggatagcaacagggggtgcaacgggctgccattttcagaacggaagctccatctgttctgtgacctccacaaaaccgtccatcgttttttcagacgggttgccggagtccgttgccgggttttcacgctcccagcccttttgtctgccatattcggaaaacattcttgggttcgggaagtaccgccagcggtcaatgcactggttcataatctcgttgatttcccggatttcccattgcttcggctcgtcaaaggcatggttcaaggcttccttatagagctgcttggagcagaccatgctcccggtgtacttatcaagatacgcctgtatcatcccggctttggtgtcctccggcataaaatcccgctggtgttctttgagataccgctgcatggcagggctgaaagccagcttgaacctgccgcttctgtaaatttccatcgcttctgcccacatctgctcgatataggctctggaagcggcttcgtcctccaaaatgtgaacctcggcttgctccgggtacaccatgacggggataaagcggcggttgccggaacggtcaaggggcaggaagtcaagggcattggaagtgccgccaaacacgcactgacgggggcggtctgctgggtgggtttcatagggtatcttgtaaacctctttctgccggcttaaaaatgacttgatttcctcaatgctcttggcatttgcggttgccatcatttccgacatttcgataatccagtgaccttgcagcttacggtacacattgtcatcgtccagcttccgcaaatcatcggagaaccactcgtcccggactgccagcagacggaagaaggtggactttccagccccctgaccgcctaccagacaaagcatgatttcaaacttgcaccccggctgaaaggctcgtgagattgcacccagcaggaacagcttcaacgcttcataggtgtaatcgtctgcgtcagcccccagaaagtgccgcagacagaaacggattcgttctgtcccgtcccacacaagggcacttaggtagtcccggatgggatggtacttgttttcattcgccacaatcccgatggcattatcaatctttttctcattggtaagcccataggtttcttccagatagagaagcagatacttcatatccgtatcgttcagggctgtgctttctctgtgaaaaccgatgggctttatgatgtccttgcggtcggtcaggatgttgtatgcgatagccccggaaagcagagggtcacgctggaatacggtcaggcagttccgtatgctctggcggacaccgcctttctcggtggtttccagccccgccttgatttcctcaatgctctggggcggctgcatggcgttcatggtgttttttagttcttgctgcgtctgcggctgcaagctctgccattcgctgttcaagctgtatcacatcctttccgtagtccgtaatcaaagccgctttttcctctgtttccccgaacagcagcacatccagctgatattccacatgggcttgcttctgtaaggcttccacaaaccggggatgaaaggcttcctccggggagtgtggggcgtagtccgttctccatgccataagcaagtggagataatcggcaagaatacggaagcagcggttctttgcttcctgaaactgttcctcctgggatttctgccggggcttgggctttttcgcctttcccggcggcttccaatcctcataggaaagcccgaagtcctgtgccagttgtatggcggcttctttctttcccagcccatacagggcggcggcaaaatcaatcacatccccatccgcaccgcagccgaagcagtggtaacgccgatccagcttcatgcttggggttttatcgttatggaacgggcagcaagccatcccgttccgacctacatggattccataatgctccgcagcctgtcttgttgtaacggactgcttcacagcttcaaatacattcaaatctatccctccttaaaaataagaaaagcacctgacattctctgattgaaaatggcaagtgcctgttaaagctccatatcctgttgtctgtgtttcgcctgtgccggggcggttctttgtgcttttttctcgtctgccttatcctgcaagacttccttgattggctgcttcttgggcggttctttgctttcctctgtgccgggggtggctttccgtacccagtatcggatgtcccgcagcttcttcaaatcctcctgtacctcggttaaaggttctttcagccctgcgatttcgccaacaagtttttcctgttcctcttgcagctccttttgggtgctgtccttatcgtccgggtgcttggcaaggtaggcggcggctttctcataccgggcaacctccgggtgttcctgtttgaatttctcctttgttttcttaaaaaatatcttccggtacttctcatagacaggcttaccttccttgcagtctgtccggctggcaagaatcccgtcaatcactttgctgcgggcttccttgggcttcatctgattgcggtaatctgcggctgatttcccggaagattccagaaatgcttctaagtcctccacagtggaaagccccttttgctggagataggacagggcttcgctgactgcctttaagtcctgtgaagtcccccgattttgtccagacctcgtccagtccttccgttcttcctttcgtatctccatatatttcatcagtagattgggaagaagtgttgcttcctccgccgttttttgtgcaagcagttctttccgtttttctcccagctcggtaatccagcctttgaggttttggataagctgccggatggacttcatcaggcggttggcggctctgatttcccggttcaggttgccgatgttcgtctggataccccgcttttccatctgccggacagcagctccctcatggacagtagggataatatcaagcccctgtctggcataagaacgcaagtccacacgctctgggcggtcattggcttccagatagcggttctggatgacctcccattcatgccgccagatttcgcaatacttctggtcgttccaatccaccgtatcctccttgtggcttttccatctgccggacggaagttttatccgttccccgttttcgtcaaggtcataaaccttgcggctcttgggaagccattttccatgttcgtccattgccctcatagtgagcaggacatgggcgtggggattgtgtcccggcggatgggggtcatggattgcaaaatcagcaatcatgcctttggaaacaaactgctgctcacaaaactcccggacaaggacagcatactggtcgggcggtatctctctggggatggtaagcacccaccgccttgcaagctgggagttccattgtttttccaccgcttcggcggcgttccacaaagtattgcggtctgcatactccggcggggcatttgccgggagcaggatttcattgtggacgataccacgcttttccgggtagtgcttcacttgctggtcgtattcacagaacagcttttcgccgctttggtaagcagcggcggcaaccgcagactgtcgctggctgcgctgaacaatcgtgatttcgttgtgtgggcagggcatttcgtgtccctcctttcggtaattggtggatggggtggcgttttaccacctcattttggcagaaaaaaagcaggagacctttttcagatttcctgctcggtgtgccgctatgtgggcggcgggtatttaattgtaaaagttcggggcaaattgacccgatgtgcggatggtaaactgggattgttaatttggaacaggtcctataatgccaactgctattgcatcaataaaaagcacaaatgctattacacaaacaattaaaatagttgtaatgactttaataataagttgttgatttttacgtaaatcactcttactgacaattcttaggacaaaaatcaaaacaaagatgatgataagagaaataatattataaagaattactgttttcatctgtgtatcctccttttccttatcaattccgacttacagaatacctgttattgaaataattgcacaagcacaggcaaaaatgcccatacataaagaggcaattacccatttctttttcttctgtttgtgatattccattgcattaaacaattcttttaaaccaaaagccaatactaaaaattgaagtattctaatcatgtccatcaatcaactccttcgccaatttttgatttattggtaattttattatacttcattgcctatcgaaaagatagcgtattttatgaaacttgtcggctgggaacaacttgcaatgcaagatgtccccagatggcaagtccacaaaagggtagctggcggcagccagcgcaggggaagtgtagcgtcccctgtatgatttggagcagaccatgactgcggaaaatcacagccctccggcgaggagccttcggagaacgcaatgcaccaacctctgggtggtgtataattgcgcccttagtaaactaaggggtttctggcttcttccgttccagcagttttttcaataattcctgcgtgtcctgtctgtgaaaaatgagtttcaacaacagcatgacatcatcatctgtcaggcgttccggctcttgcagaaaactttccagcataccgccacgggtacagagccggtgcgtccgttcctttcgggtaagctgctttaactggtgctgcaatgccttttcatcattgatggctttccgcagtttcttttcgcttttctccagctcccggttgagcttttccagctttgaggtatcaggcaagggcagcgtcctcctttcccggtatcagcacataaattcggtttggttctccaacgccctgacgcacccgcatgataagtccggcggtttccagttcattcagagaacgcttgaccgtcatagagctgcgggacaagactgcggcaatggctgtaacagggaagcagacaaacaggattccgtgctcgtcctcctgccctttggatagcatagcgtccagcatccggcagtacatgacctttgcggtgctgctgactggaaatcctgtcaacgctatgggaaagggcatacagggcggcaatggtgtgtctatcgtcataaattcaaaattcattcggtgtgttcctcctttttctttgctcgtttggataaataacgggggcagtcaatcacaaccgcccggaagctctgcctgcacccatgctggcatttccggcataattcgttgtaagtgacacgcccccggtcattgaggtaaaaggaaagctcatgcttcctctttttgctcattctcggcatattgcgcttcctcccgttttagtgtatggtttcggggcgattttcggcaaaattacagccatagagccgcttaaaatctcccgaagtatcagcgatagggtagactgtccccctatcagattgtcgtgtttcggtatcatttcggtgtcagttcgccagttctccccggtgtcgttcctcccctgaatctcacagcggcgtatcgctccctttggtatgctcgttttggtaagggttcctccatatccctgccaaaagtcatggcactacatcgccggggaagcatatcccacacaggctggtcattcgattggaataatccatcgatgaactacctgtatcatagaacatttttgtgccctgtgccgtatgtccacaaagtaggaattaggagtaaaaatcagaaatttccacgattgcggaaagtgtgatataatccagttaagcggcagcaatgaaaccgccggaaaggagtgtgcgcccatgaaaggagcaacaagcatacaggaacgcctttgggaactccgcaaggacaaaggcttaaatctggaagaactatcaaagctgacgggtatttccaaatctgctctcggaagttatgaaaaagaggattttaaggaaatcaatcatggcaaccttatcacgctggcagacttctatggggtttccgttgattatctactgtgccggacagagaacagggagcagatcaacacgtcattgacggagctgcatttgaatgatgagatggtagcacttctgaaaagcagtcggattaacaaccgtctgctctgtgagcttgccacacataaagattttatcaagtttcttgcagacattgagatttatgtggacgggattgccaccatgcagattcaaaatctcaatgcacttgtcgataccgtccggcatgaaatcattgaacggtatcgccccggcgaagatgacccgcatttgaaagtgctgcaagccgcccatatcagcgatgatgagtattttagtcacatggttctggatgacctcaacctcattatccgggatattcgggaagcccacaaaaaggacagtgagagtgcaccccagaccaccgttgccgatgaactgaaagaaaatctggaagcggtcgaaaatttcaagggcagccgggatgaaaagctggttgtcctttactgcaagcaacttggtatcaactataaaaatctgtcagatgaagaatttcgctggctcattcggattctcaaaaaatcaaagaaaatgggaacgcctatcagccagaggaaaaaacggtaaaaaaaaccgctgttgcatggttggggtgccttccatgtagcagcggttcttgctgtggttattatttcattcgttttcttaatatccggcgataatttgtttctccctttggtgcgtcctgtataatttccaacacaccatcttcaagcattttatcaatgcgattagaaatccatacatcactaattccaagttgatattttcctaaaacattacctataacaatagccattttgaattgctctggctgttccgcaatttcacgaagaatgaaactatcatatatatcttctgaaacactttgcaatttaccatttagcattgcacgcaaaggtgcattttcattttgaagttgattccatttcatagcacaagctgaaagaaatacaggcttagctttttcttgtagagttatatattttccccattcgccaggagaaacctcaccccatgctattttggatgtcatagtattttcttttccatattcccaggcaggtaacttaaccaaataaattgttgtctgacagtttaatggtcgaagttgtttcataagccagtacataccgcaaagttcatccggattatagctataccaaatacgaacttcttccccagctacatatcgttcaataaccgaagacaatgtagttttaattttctgtattttttcttcaacctgatagtctaaatcctctacaaaccagacagacagcattttcttgagaacatttttccgctgttcgccaattccattatcagaaatatctcccacactaagagccatatcaaaacaataaacatcactgctcttgcctcccaatggaatagcattctcccaagcaatatgttcttgttcctgtgcttgaatttgtgcttctttcatttcatctgaagatggaacactcccatcttcgtgcctcataaagaccgaaactgcacttcctctatactttcccttaccgtaagtttgggcaattttcaaacttccacaggcactttcaccaaatacaatttcaatcatcttatatacctccgatttaattactcccgtatgaataaattatatcatgcaaaacaatttcttctgctcggttgtgaatgttattgcaacgctgcacccattccatttgacgggtacgcttcaattcctcggtcacgccctcggtggctttcatctgctccatgatggtgtctaaccgttcctgtgcctgttcgttcaggtctgcaaggtatgtccataactccccggtcaaggtcaatgtgttcaatctggctgggtggacttctcttaaatattcccggtgcatccgtccgtactttccgatggggcggtgttcttccggcagcttcaagtctgggatgtagtaatctccaacaaggatataatcaattccgttttctgttattcttggtttcaattcgctcatgttccttacctcctgtggaagcaggctcgtctggtactaactcaattacatcggtaatctcacaattcagcgtttcgcagatacgggctaatgtgtccatgctgatgtgctttccctctttgctcatgttggcaatcatattcgttgtcataccagcagcaagccttaaatcttcttttctcatatcacgctctaacagtgtatgccagagtggtttatagctgatgtgcatattgctttcccgccttcctatccataccaccggggcggctgccccggcaggaacttttctcttattatagcaccaatcttgtgaaatcacaatttattcttgtaacctgccgctgataccgtctggattgtgcttttcctttctttttgctccctttaattagccatgaactgcttcatgccctgggacttggagcccgggttatccgagccgtagccctccagcagattgaccacaccccatacgccaaggccagcgccgagcgcgataacgagggtctgtaaagtgtcgattgcagatgagaaaaatgccatataagcctccatttctccgggattttcccggtaacaaaaaagccgcccatgcaggcggcaggttacaaacttcgggacactttgtctcgaagcgtttatgcaaaggcgtctggatcgtcgatgtcatcatagttgaggatgtcctcgtcctcttccgtgagtgcatcgtccggcacagccacctcatacatcgtacacgcctcgttcagcccgggccgcctgcggcggttaatgagcctgtcgaggtcaaaagcgtttttctgtttatcggcctccgccgtataacggtagttcggatgccgtttcagatcatacttgggagagaagaacgggggcaggccccgaagctgcaaaatacatttgtctcccggcatggttgcaagctcggctggggtcatcagttcccggcccagccgctgggtgttttggctgtagctttccgactggccacgggagcggctgtcggtctgcatactgattgtggcttttcccagccagttctcggagatttccttgatagtgctggcttcgcggccaccgaggaacaccacgctgtccatgttgccgaggattgtctcggcgtgcttatcgtaaatggccttgcactgtgccaactgttgatacagcaggcaaagactcacctcgcgggagcggataaccgcgaccagcttttcgagctggggcacctgtcccgtgttggctgcctcgtcccacagcacccgtacatggtgcggcaggcggccaccgtgaacattgtccgcccgttcacacaggaggttgaacatctgcgaaaatgcaagtgccactaaaaagttgtaggtctgcgtggtatcggaaataatgaagaataccgccgttttccgatctccgatgcggtcaagctccaattcgtcataggccatgacttcacgaagctgcgggatgtcaaagggagccagccgcgcaccgcaggaaattaaaatgctttttgccgtcttgccgctggccaatttgtactttttatactgtttgactgcgaagcaatccggcttgcgcttttcgagcccggcaaacatataatccaccgcgttcataaaatcctcgtcatcctccttgacctccatgccggaaatcatatccacaagggtattcatgttccgatcctcggcaggcccctcgaaaatgatgtaggcaatcagggcgcagtacaaaagcgtttccgatttcgtccataatggatcgccttccttgccttcgccctttgtgttggaaatcagggcatccacgaatttcagaatatcggcctcattgcggatatacgccagcgggttatagtgcatggattttgaaaaatctatgctgttgaataccttgattttgtacccgcgtttttgcaggaaacccccgacctgtcccagcacaccgcctttgggatcgaccaccacataagaggaatgagcctgtaaaagctggggcgtgagccagaagcgggttttgccggagccggacgagccgataatacagcaattcagatttcgggcatttgcgggaattttcgggcgggtattcatcgtgagaaactccgtcccggtcaaaatcacgttgttttcaaacttcggatcgacaaacggtttgatgtctttttccgttccccatgaagcgttttgtcaagtgctttttagagttattgacgcaacataggctcttttttccacgataaagccccacgcggtcatacatggggcggtgggattatggttgaagtggcgaagtggcaaagtggcaaggtatctgggttttgccacttggattttgccagttcacttttttagggcgtgataccatgctgcgccgatacgctttgaggtaatgcgtccgtcaaggtttttctttgccgcccggacagtacgggcagaaatccccgcgtcggctgcggctttctctatgtcctcgctggcaagttcttttccgtctgccagtaggtcaagtatcagcttttcagcctgttcggttttggtggcgttgttgccgcccgcgccggacagcagctcgtcggcagttatatcatattcgcctatccactcaaagcctgtttccgggtcaaggcaaaaggcaacgggctttccctccggcgcaagggaagatttgtcgtgaatgataacacgaacattcggctcacgcttcacgcgcccgattaaaaggacgctccttgctgcggctctaaagtcgatagaacctaagcccctgtatgcgctctgtcctccggcagctttgttgaggtgtccgataaggataacggcgcacccggtacgctctgcaacttcggcaaggcggcgaaaaatggggcgcacctcgtttgctttgttcatgtcggctttgtcgcccatatacgcctgtatggggtcaaggataatcagacgcgccccgttctgtatgattgctttctctatgcgctcgtcggacagggtaagctcccgttttgcttcatcaatcacaagcacccggtcaaggtctgcggcggcttctatcaagcggggcttgacggtatcgcccaaaccgtcctcggcggtctgataaatcacttgaaacggctgtataggcttcatgcccggaagcgtcccgccagtggtacaggcagcggcaaggcgcagcgcaaaggtggtcttgccctcgccggggttgccctgtactatggttactttcccaaaggggatatacggctcccatagccattcaacggtctgtgtgtcaacctcgctcatgcggataatctcaacggtttcttcctgtggcggttctttcaatccatagacagcttcccgcagatatttcccgtctgtgatttcgccccggcgcgtctgcacctcgttccagtctttgaaaagagggataaggcggtggacggtcaagccctccggcataagctccacaaggcggctgcaagcgtcgtttccggctttgtcgctgtcaaggcagagatatacggtcttgatgttcgggcggtcagagagaaagcgcataagggctttatctcccacgccacccagcgcaagatagctttgcttctgccagtcctttttgaacaggcagagaaaagataagaggtcaataggggcttcaaagacaaacaacctttcgccctcgccccggtagcagaagttaaaggctttatcgctgcctttcacatcaagccggaagttcccggctgtgccgcgctgatgagcgtagcgtggtactccgtcctcgtcccgtcccacaaatatggcgttatggtgggcggcttcctcgtaaatatccccggtggaaaagaaaaagcccgacacatcttcatcaatgtggcgggcggctgtgaggtagttcctcgctatgcggttgtcggagctgcggggcggcagtcggaagtcagaaaaggacgcagggcttggtctgtccggcggtggtgctgcgcctttttctcctgtcagcagttctacggcttcggtaaagctcttaccgaaaaactccatgacaaaatcaatgggtgcgccgcctttgctttggctgtgcctgtaccatttgtttccccggatagtcaagctgtcgtgccgtttccaacggtattcctgtccggcgcgggtaagctgctcgccccgtccttgaagaaaagaaacaaggtcggcttggttggctcggtctatttgttcttgggtgtaatacataaaatttcaactcctttcagcggtctatatcatgccgcttggtacggttctgtgtctgctccggctgctcggctctcagcgcaatatcaacgcacttgcgtatcttctgaagctcggcaacctcggcgcgggtagctttcaatttggtgtagtcggtatctctctgctctttgaggtcggcgtattcctgtttccatttggagataggcagcgtctttgtatctgtcagatttgcatggagatagcggcttgctgcattccataaggttagctcggcgcggtgggtttcctcatacttatcccgtttgttcgtccagccgtttttcagctttttcagttctgcatgaatgggcttgtactgcaaataattctcgccgttctctatcagcttttgcagctctttcatgcgctgctcggcggctttcattccctcccggattgaaaaggcttcatcactgacagaggaaagagaagcgtccaactcgtcaagggtagagataccatgctccgcaagataattcgccgcctgtgatatggttttcagttcgtcggctgcgtgttggtgctgccagctctgcgaatacttccggctcttttccctctgaacgcccaaatacttcatcagaagatttgcaaggttcggagattttggcggttgttgttttcttggggaagtttcccacgccgcaagcagtccggcaatccattctttgaggttgccgatctgcgcccggatttcctttatcagtctgtttgatttgcggatagcccggttcagttcgcctttctcggtggctatgcctttcttctccatttgacaggcggctacgcccatgtggacagtaggtatctcgtcaattcctctctcggcgttgctgcggtggtcgatacgctctgtgcttccggcgcgttcaagatagctgtttgaaatatcagcccacgctttgcgccacaagagggcgttgcctttgtcgttccagcctgtgaggtcaaccttgtgggtcttgtatctgccattcggcaagcgtatgcgctccccgttttcatcaaggtcatattcctttttagacttcgccgcccacgcgccgcgctcgtcaagtggtcgcatggtcagcatgatatgacaatgggggttgccgctgtcggtgtcatggatagcaaaatccacgcacattcctttagaaacaaattgagaggaacagtattcccggacaagccgtatctgttcctctcgtgataattctatggggagtgctgcgtcaatctcacgcgcaagctgggcgttcccggctttctcataaagttccacgctgttccatagggtagaacggtcagagaaagagggctgggcatggggcggcagcatgatttcggtatggacaacgccgcctttgcgggtgtagtcgtgggtcattccgtcccactcgtttgtcagcttttcgccgcttcggtaggcggctgcggcaactgctgatttgcctttgccccgactgactatgctgatgttacaatggtaaatggctatgggtatcacctccagtatagcggatataaaacttgtggaaaatgaatagcttgcgtagcaaggtgttcggtttccgcaagtacacaaaagggtagacagcgcaagctgtcgcaggggaagtgtagcgtcccctgtctgcggcaaagccgccaatcgtagcgcggggtaaaatccctgtgcttaagataaagccctcggcagagcgcacacgcccgttagggtgtataagtgcgcccttagtgtctaagggatttattcagcgttcccgttctcggctcgttttttcagatattcccgtaccagctcactcgtcagtgcaaacctaagaagtgctgcggcttcctcgtcgctcatgttctttgcttccggcacaatgctttcaaagactgcgcctcggacaataaggcggtggctgcgtgtccggcgttcctcttgcgacagcttttgccgcagcaccttttcccggttctcaaactgccggattttcttttttccgtcctcgatttcggcttgcagttcctcgcgggttttctctcttggctttgtcatggttgatcgctcctttctgctcatagcatagaaaagagcagccgtttttgtgtgaaaaaggctgctctcattgaattatttggtttgtatttatatcggtaactacgaaaacttattgacttatgctttctaaagggaaagtaacactccaatttccttcgatatgtgtatcgctcgtaacaaaatatccatatactttatattgggttaaatcaacatctgacaaatcataaacatattccacataccgttcttgatgttcactatcagtagaaaatgcaatatttgcgatacagtggatttcctctcctttgtcatttttgaaatagatatagccatgattatccgtttctaaactatcctcgtacttgacttgtatatgcaatttcccatccacatatcccatggctgtaatatctacctcagcaataggggaacacagaatacctgttgttttcaatgcctgaaaattgttttccatttcattgtagtttgttcccccaccaccccaaatttgagtcggggtaattgtttttggtgtagcactaatttgggtcaaatccaaatctgtcaatatcgcatcatattcctgcttattgctcagcatttctcggacacaaaaagtaattttctcaccaataatgtctttttcattccattgtgatatagaaattaggaaagtggcggtttttgtttcggtgtcatagcttatattttcacacgaactgctacaatcaaaaggtgtattgatactaaagctatcaaacaaatctgtcgtttcatcaattctatctccgtcaatatcttgtacggaaataaaaatctttgcttcgctaccctcaacataagccgaaattacttcaaacttaatcccattatcctcgcaggacatactaacaggctttaacttttgggcaattgccggagataccttgtagagtagattataagctggtccaaaatctgctgccgctaatgctggaacagacatggtaaaaacaaggagcaaactggctaccatagctccccatttaatccaaatgggcttcttgacctttttcttatagttaagggcttcgtcaatgtatttgttgtcaagctcgctcatagcgtcggaaaacttctttgcgttcatataaagacctctctttcaattaaatattgtttcatcttttcgcggatacgggtcagccggacagagacatttttctctgaaagccccacaacctcggctatgtctttgtagctgtcagaaaaccaatagcggcgcatgaaaataacgcggttttcagtagtcagcgtatctaaaaaactttcaatgatacgggctaattctttagcttcaatttctgcttctactgtgtgagtatctgctacataggtttcaatttcctccaaagcaatcgtgtaatggctgcttcgtttggctgcttcctttctccaataaattttgattgaaatgttccgaacgattttcagaacataggataaaagtgggttaggtcgtgcagggggaatagtgttccatacacctaaataagcgtcgtttacacattcctctgcgttctgcctacttcctacgatatgataggaaagattgtggcagactgttccgtattttatatccaactcccgtatgccttgttctgaacgttcaaaaaacatttctatgattttttcatcctctatcattgcaccgcctcctctccggcttcacctatatactacggttttaacgacgaatactacatcaaatctcaaactttttcaaaaaattataccacacttcgcgtgagattgcttgcgttagctttcgccgcttcgctggcggctctccggcgttgctcattgtatggggcggtcagacggaaagagaaacgcccctttgcaatatcaaactccatgcagcctgtttcgtggtctgtgtcggtctggtagcactcgtcggggtactgctcggcataagcggcaagccgctttttgaggttggtgttgtgggtgcggatatggataagggggtctttctcgtcaaaccatatatcggtggtcttttcctgtttggtaagccctgttctcatgcaagctcctttctgcgtccctgttacgcaataggggtgtttttcgggtgttttcctcggctcttgacttggggaaaactgcgtttttgacgataaaaaccgtccaaacggggaatgtatcgtcggggcggctgttatcgcaagatttctgttttttccggctcttgaccgtcagacgcagaaaaacgcagactgtcggcaagtatcgttttcagcagcttgtcggagaatgtttctgtggcgttgtggttaaaaaacagctccgcaacaatggtctgcccgtttctctgtgtcgtgataactccgtccggtttggtcggtggggtgggtgttcctttcttttctgtcaataggttactcctttctccgggcgtaaaaaagggacttcccgtagttcggaaaatccctctatgatgttgctattctgttttatggtgcggacagtgcggcggcagcctgcgcctttttcttcgcccgatattcccgcgctttgatacggtcgtactcccgcctcttttcaagatttctcgcccggtattctcttgaatagttgcggtggtaggcgcggctcttttcctttcttgcttcttcgatttcctcacgcatttgccggatttcctgctctgtcggctctgcaagctgtgtcagttcattttcaaatctgccgatatggttaaaatatatcccgatatgctgaatagcctgtttcgcccttttcttgtcacgctcatgcacttcaatccggctgataaactcgttgaggatagtcggggtaaggtcggtaaagtcagcgtaacggtctatcagctttacaaacttctgcgcccgtcctcccgcgttctcaaaagcggatagctgttccctaagctgttcaagctcggctttcagtgagtagtattcttcggaatacttctgcgacatctgctcatagcggtcttgcgggatagtccccagcgcgttgtcctcataaagtttattcagcaccttgtcaatctgttcaaggcgcgtcgtgatttgcgggatacgcttttgctgtttctttgtcttgtcggtctgctgcatggcaaggctctttttcactaaggcttcaaactctgcccggttgctgatagagtattccgcgatttttttcagcacatctgctacggtctgcatgagcagatccgcgtccatgatgtgcggagagctgcacttgggatttttggcttttcccttgtggtactcgctgcaataggcaacatggcgcttgccgccgtttcggtaatctatgcgaatgtgcatttttgcgccgcagtctttacagaaaagcaagccggacagagggtggatttctccgtccccgttggggcgtttgacaggtgcgttttccaaaatccgctgcacattttcaaagtcggtgcggtcaataatcggctcatgcacattttctgtgatgtgccactggcttctgtctacatagtggtttcgcttatcccgaaaatgctttgtagtcttgaagttgactacatcgccgcaatactcctgccgcgtgaggatatgggtcagcgtggctttgttccacttgtaacggttatcctcgttgagcgtcttatttttacaagttccccgcccgcggtctttcatgtagaaagtgggggttgggatttgctcctgtgtcagatatacggcgatttggtttcggtttttcccgtccaaaaacagacggaaaataaggcgtacaacctcggcggcttcctcgtcgattatccaaaaatccttgttgtccggggctttgatatagccgtaaggggcttcggtggcaatcggctttccactcatgcctttggtcttaatgcccgttttcactttcttgctgatgtcctttgcgtaccactccgacatgatattgataaagggggcaaactctaatgtgtcggggttttcgctgtctatgccgttgttgactgcgataaagcgcacattgttccgcctgaaaatctccatagcgtttccgacttggagatagtcgcgcccccagcgggtaaggtctttcataatacacacaccgatttttccgctttccacatcttcaatcatgcgggagtaagcagaacggtcaaaaaacctgccgctttcgtcgtcgtcaatgtagtgccggatattggttaggtgctgccctttggcgtagttctccaaaaagattttttggttctgtatgctgttgctctcgccgccgtccctgtcctcgtcgcctacggaaaggcgggagtaaagggctgtgattttattgtaattgctcatgtgcatatcctcctgcgtccataaagtcgttgtttacagttaagattatgcactccaccgggcgctgccgtattctgcatcccgccggaacttcttggcgttcttgcttttgaaatagatcagcagccggaaaacgattgcgcccacaatgccgacaagccaatccagcggggcaagaccgggtgcaaagtcagcaaaggccgggccaatcgtctggcccagcccgatgagcttatgtgcaaaatcgttacccgccgccagccggtaggccgttcccagcttgaggaacgcccacaggatgaacagatagggaatgttcagaatgagatattttctaatcttatctgtcctcatgggccacctcctttgcatgttctttctgtttcggcttttctttggaaagctgatccgccgcctgttgcagttgttctcggatgggaactcggttcgattttgctttgcttaacaccttccgggaatactcagaaaagcaggcggtcattgcgtctgcctgtccagccttgaaaaacaacaggtatttgtccggcccggttttatagaacgcatagtctacattccatttccgggccacacggtcaaaggacttggcatccccggatagctcgatgctgtttgtggatgtaccgtgtgccatgagctttcgcacactttgcttgccgtgtggtgtttgccgcccacggtatgccttgcggatcttccgccccaccatacccagcacatacgccagtccccgcgccgtcagcttggttgtttttacggatatggctatcgtgcgccgggaaatatcttcatcaatcagttacaccgcctccttccttgggacaatttgtctcgaagtaccgtcaccgatccccacggtcttttttctgcatttgacggtagccctccagcgaagaaccgtctatgatttcctgataggcggccatttgctcccggatagagagcttcgggaaagagaataccttatgttccttgggaatatcctgcaagccgtgatacacttccacgaaatgatcgctttctttgacaacatagccgcccggggcaaaatggccgttttcgtggatgcaggcatcccggccatacgcctcataatcgaaatatggttttacctgatccggcacatccaacatttccagatcgtccacataaatgcgccccagcgtttcctcatcggatacgccggggtaaaagccgtaacagtccagattttgtgtcagattgatgatgtcccgcaccgaagaacagtgatcgccgctgtcgaggacggcctccagtgtttccagctccgatgaggtaagctcggaaagcaggcaggccagatgattaagctcgtccagattttcatactcgctcaaatggtcatagagccccagcacatccccatcgaaagaggtaataaagatttcctgatagcggacgccatccacgccgatccgtttcaaaagagcctccacctcctgggcggttgtgggaaatttcagtgtttcacccacaagctggccctcgctgtactttccggcgttggtaacgtaggcttcaaacagggttgccattagcggcggccctgtcccttgacggtcaggatgccctcaagggttgttgccgtaattcccagccgctgggccacggcaatatcatttttcatggcttcggtcatactgtgcccgcaaacaaccagcacatgagaacggcggagcaggtcacggctcatgtcgatgccgcttttatgctcctcgggaacagcatcattgagaaacaggggcaagtacaaaggcggacaaataggagaaaagcctgcctcatacacggtgcggcaatactgcgccgccagttctgcgttttcgctatcgccgccgagccatgcagcggtgatataagcaaggggtcgtttcatcgttcatacctccgatattttaataagaaagttcaacccaaaccccacgccctttcccagtcttgggaaagggggcggctctggaggatatacccccgccgcttgccggggaaatagcacagccggggcagaccgtcaagggcgagccgccgaaaacggcggtgcgctgcacccttgacggcccactcccggctgtactaaaaaacaggcggcgacgggggatatataccaccagagcctctgcgcgagggcggggccctcgggacaaagtgtctcgaagttgttacttgtcaagttcctgctttttcggggcttttgccagctccggcggctgtttttctttccagtcatccagcagggacataatctgttctttcattttggcgggagttacctccttgccaaaatacttttccagttccgcagtagaaataatcacgcctcgatcctcctttttctgttctgataagatgccgtcaatgacatcgccgttgagcttgccttccttatccagttcccggagccgtttagcttgggccagcgagggcgaagcctgctccccgtcaatggaaacagcaataagcctctgatttttcggtttgatgtaggacagttccacggcaggcataaagcccatctttttatcgtctaccttatccagaagctccggcacaagagagttgagccgcaagtagcgcatgacctttttatagttcatctcatgcgcctcgcccacaatctcaaccgagcgttttccaacatcgccttccgcaacgcctttcagccgcccgccctgatgcttaatgtcctcaacctcaagttccagcagcgcggccaattcactggggagcatcccgtcacgctgcttgttgctgtccttcatggcctgcaccgcttcgtggtcggtcatttcacggacaataaagggcatttcctccagccccgccagttcactgccgtgggtacggcgatggcccgctacaatttcatagccgtttccgtctttctccgggcgggcaagaccgggaaccattacaccgtttacgcggatagaagcaacgatttcctgcatcttcgcatcgtcccgtaccttaaaggggtgcggacggaatgtgtgaaacggatgaacctcggaaagtttcagataaaccagcttgccttcctcaatcgggcggggcggtgtggtcggctcgggagccgtctgttccgcagtggcagtttccttcggtgccgtatcctgtgcgggcttaatgggctccttggcatccggggcctttccgtcacttcgggacactttgtctcgtttggacggcttgggcttgtcaggggccgtcttatccgccttgggtgggcggcccttgcgggccccagccgatttctccgatttttgattttcagtcgcggccttttctgctttcggcggacggccacggcgcggctttttcggttcctccgtattggctggctgcggtgtttctccgggggctgccgcctccgacgcttcgggggtttccgccttttcgacttcggcgcgggcgttctgtctcttttctgccataagctcattgattttgtcaaaggacacaaccacatcgccgggctcaggtatggcaggcccggtctgttcctgctggggttcagatgctacggcctgttcgggtgtggcgataggctcggcggcctccggggaaatattctccgcagggccagtattcagtttttcatcggccatttacgatcctccttttcgttaaagttgcacaaatttgaacgctaaaattttgtagttatttttgcgcctcctttccgtctatccacgcaaaaaagccgcccgtttctcatgccggacggctttttgcgtaatgtgatagatcaaatattattttttctggtttgcaggctccgaaaagccttgtatttacagtgttcctaataggaagtaatcatatggtaattgaatcacaaacgtgcttccttttttctttttgccggaggttaccgtaatcgtacctgcgtgtttttcgataatttctctcgatagaaaaagtccgattcctgtaccactcttttccatgacctccttggaacttcctctgtaaaatcgttgaaaaattttgtgatactcattctgcggaataccaattccctgatcctcaatttccattcttacaagatcgtttcttttttgtaaccggataaatatttttgaaccacacggactgtacttgaccgcattatccagaacattgatcacagcttcaccaagccaccttttatcctgcataatcgtgcatgtttccagctctttttcatagtcaaaaacgaattcaatttctttctcatccgctttaggataagtgcggttcacagcagatatgacagtatccataagcggaagttttttcttattaatctgaatcagtccagtttccatcttggatatttcaagaagcgactgcaataatgtctccagtccatccagagcactccgacaacgaatacgaaactcctcctgttctgtggcacttaagtcattctgcatcagcacactaaaacatgtatccaaagctgcaaccggtgtctttaactggtgagaaatatcagaaaccatttctttcgtgttctccttttctgcccttgcttcttcctttatcaactgaatatgatgtccgattgcttcaagctggtcattcaatttttccagttctgcatgattttccgttttcagtaaatcatcaaatttattttcacggaatctgatcagaatttcttccaactggtctaaaattttctgatgacacgcatcttcttttttcttccaataaagtaaaaaagtcaaaagaagcacgcatatcacagtgcttacagcaccggtcaccataacctgatgccggaattgcatataaaatgcattccctttatttccccagtatccatattgctccaataatcgccttccctgttcgttagtttcaatatccttatccttaagcaattccgaaacagcatccagcccggaaaattcttcctttgcagcaatctctgtcataagattcattttatatttataatcttcataaaacacatacgtggtaaagcaatttaatattgcaaacaataatatgacaggtaataccaaggagagcactactgtaatcttcttgcgatatctctttgtcactgccttacctcctgattccatatatacccaagacctctgatattctttatatagaccggtgcagccggattgtcttcgattttctcacggagtcttctgatattgacagcgattgtattttcatccacaaaatccccttccagatcaaacacattttccaatatttgtgtttttgaaagaatctgtttcggattctgaagaaaaaaagtcagcattttcaactccgtttttgtcagactgatttcacgactctttatcaggactttcatttctcctgcgataaatacgatatctcccgaaatcatctttccggcttccgttttctcctgtctgcggcggaaatgtgcttctattttcaaaagaagtaccgaaagactaaacggcttcgtaatataatcatctgcccctgcttcatatcccatgacctgatccatctcctgatctagtgctgtaagacaaataatgtatgtattataattgcatctcatccaccttacaaattccagtccattcccatccggaagattcacatcacaaatgataacatccacattattatcacttgcaattcttttcgcttttttcactgattctgctgaaaaaacctcatatccggattttttcagtgagaatgtaattccacgatttaaattttcatcatcttcaaccacgagtatacctggcatagcatatgcacctccctttattaactatttttcctcttcgttaagacctggttcattacatatttgttctgcctcaatatcttcggtagtgactttccctgtaatatccctataggcttctttatctcatcatatgttgccttagtctctgcagatgttatatccacatcatcaagttcaatcgtgacattaatataatcatctgattttttttaagctcataaatctgagacttcagttctgtcattgtttcttccccttcatctattctatcatattgagcatccaatcgtctctgtaaatctgatatttttttatcgtaatgagtatctgtaacatctagattgtccatctgctgttcaatgcgtgtttttattgtttccgcctgatgaagacttgcatttaacacagataactgtttttccagatatctgatcttgttatcttttctccctgctttggcaatatttccatacattccttttccacagcaaagacattttaatattccggacaaaatatgtgcatgttccggatcatgaattttttcacgcctataattattttttgaacgcttttcctgtgcaagctcccagtcttcctcggcaataattgcttcatgaattctctcataaacagggaaatctgattgctccactacatacgtttcattacgggtccctgttttcttctctgtacgcctgcgtccatatgctatcttccccatatataccgggttatcaattatcttcttaataaagctggccgagaaccccggtattgttccattctaacgcagcttttttgtatatccatgattgttcagataatttgccacgccattgattccatcattggtatgaatatacctgtcaaaaatcatttgaataatttccacttcatcctcagcaataacaaattccccattttccagcctatatccatacggtgcaaatccgccattccacttaccttctctcgccttctgctcacgcccagccattgtctgcactctgatattttcccgctccatctctgctacggccgcaatgatagatataagcagtttatcggcttcttttgaactgtcgattccatcttccacacagattaggttcacaccataatcctgcataagctgtaaagagctgagtacatccgccgcatttctaccaagtcgggataatttaaatacaaggacgaaatcaactccgtccttgccatcttcaatatcattcagcatccgcataaattcctgacgaccctttatattcttaccggaatacccttcatcggaatattctcctacaatctccatatcctgaaattctgcatatttttttagtttgtccttctgtgcatcaagactatagccatcaacctaaatagccgtagacacacgagtatatatgtaacatcttgttttcttcttcaataatttcacactcctgtattattcatttgtcaactttccagattgctctgcaagctttttctcttctctcttcactctacgttccagtttcttaatgtcttccgatgctggtaaatcttccggtttaattcctctttgtccaagcatgtctctaacagaagtattattttccacatgttcaacagtgattgcagattctccttgcaagtccttttcttcaacattataattcgtcatttcagttgcaagattttttgcggcaatggtaagtgttggtaggaaatccgcaagtggtcttttatcctgtacgcccaaacgttctttcatctgtttcgtggtaaatccaccaaataaagcctgatctcctttagaccgaatacgaccaaatcctgcatcatctactccacgttcatatatattttgagacaatcttttttccgattcccttaattttcctcttgcctctgtcctttcgatataagaaatcctttcttcaatcaattcctgttttctagtctgaaccgcaaaatagcattgtgcaaaagcaatctgctcctttcgtggatctccattttcagcaataagataacatgcataacgagtaagcatataatcttcaacttcacgaagtgcaccgtttccaacttcaattgtattgttaaatcttgaaaaatgatcttctgctacgtttccattattctcacatgaaatcattgctttatttattgcattatcaaaatttctccattgaacataatccaataatttcattagttctcttgcataccaatactcaatgccatccgcttcatgtcggatatcatcaaattttcttctgtacaattctattattctcttttccattcaaattttctcctcttatgaacatattgctgacgccagcaatatgttttttactattaatttcttcaattactctaacacattctcctttgtgttcctcatcttgtcataatacgctttatacctgtaaattgttctctcactgacattattacgctttgcaatctctatcatagtcattccactttcataacctgcaacaaaatcattatagattgccatccacttggcattatgtttctgtcgtccgctcatctttctgtttttataatattccagttcttcacgaagtttctcgttttcacttttcaattctgctattctcttaagcgcggcttccagtgtttcaatcttttccattttcatttcctccgtttatgtcattatcattttgactttattataaattggattcatgggtaagtcaatctgatattgtcatgcagtacttttttccagtccaaacttccacttcttcatattttctacatatcttccatatcgctttacagcaagttctttccaaaagcatcccacgtgaatatttcttaaccattcttctacagcccacttctttttaacagtagaccatatttttaatcatgttagtgataacatcgctacatcgttcaaatgctgcattttcttttgcgtcttcataatacatttttctcatttcttatttctccatttctttaactgaatttccggtgtccattcgaaagtttccggctgtaaaatatcatggacatagattttattcggtttacccaatccctggtgtctgcgataaatcaaaccatgaaaataatttttcacggagctacgcctatcggctttgtcatactgatgtgtttccaacatttcataaattcttcacttcctttcccgatttatgaaattattttctatgccgattcggtatatccaatatgctggaaaaattttgtttttatcaatttttccaacatccaagacaagacaggaaaagaatttctctttatctcatggcaatatcatggtaatctatctgtatctttaaaaatgaggaagatgctatgcatacaaaacttaccataccagaaagactgaaagatttaagagtctcagaaaaaagaatgtcgttgcaagagttatccgatgctaccggtatccctagctccacgcttggcaattatgaaaaagatgaaaatatagatatgtcacttggtaatcttataacgcttgcaaatttttacaacgtaagcacagattaccttctttgccggacagaattgcggaaacataaaaatcagtcagtatctgatctgcacctgaatgacgatgcagtccaaatattgactgacgaaaaatataatccaagattattatctgaattgctcacacatgaaaatttttggaaattcatgactgacctggaaatctatattgatggctttaacgataagggaattcagatagcgaatgcttttcttgatgtgatgagatgtaaattaacagagcttggtgccgattccactgatgcatttgcaactgtatttgataattctcacattgaagcagaacaatattacatgaatattctgtcagacgacttaagcatataaattccttgctctgtaaatgcgtatggtaaatatctacgtccgccttcctgcccagcaaaaaaatcctttttccgtgaggtcacaatttgtgacctcacggaatcaatttcactattagatagccgaaacataaaatcttctggaaatctttctatatttctttttacttgttgatttaacttttttacttcatagccataaatttctgccaaatctttatctagcattacctgctgtccacgaattatatacactttactacgaatatcatctgtagtaatcaattcttttgtttcttccattcttcctccaaacaaatcggttacaatttctataagcttcttatgtcgttcctttatcgtgaagtcacaatttttgatttcacagattagtccttcactatacgctccatctgctccagcttctgcaatgctttcatatatgccatcaatcttttatactgctcatctccgataaaatttgccagatcactccaagcatctctttcttttaaaaccactttattcttaaccataaatttaaggcgggcaacttgcccgccttaaatctttaaattatgctttgatttttccagaaaatattttacttactttgtttttcatgagtatgaatacaatttttacctatttccgtatctgcgaaaacttttataaataaaaggcagtaaggctattgccatcactgtatacattaccattacaagcggaatttgtcgaaatacacaattcccaatctgataaataagtgggacttttacacttgcctgtacatttgtcaaaattgttggtatcaaattgaaaagcgttgtatacccagaaagtgcccgtcctataaatggcaataagcaatataaaaagaatggaatgcaaacagcgacactaattgtatgcattttagccgctactaacatagacactgaagccgccagcatactggctataaatccacatacaactgtcaacaaatagtattgtccatatgacataatgtaaatactatatgcctgatacatttgatagggtgtattcataccgctggttcccataattccaaaacaaatcacactaagtaatataattcccatacaataaatcataactgtcgtaactattcctgccagtatttttgttttaacagcttttgtacgtccatactttgtagagaaaaatactgcatctgcttttgtctgaaaatcatctgcaaatattccagcacaaataaaaccaactatgattgccagaataatagaatacgtttctacatacataatcatagtatcccatgaactataagattcgtattctactggtaattttattttattatatttcttttccaagtattttttctgaacagaagtctttccatattcttctgccatcttttccatatttttatgataagtgtcatagaactcttgtatattttcttctgtaatttgattcagaacactttcatcatattctgcatccggtgttaataccgatattataaaactcctaatatcatctatcggttgtaatgtcgttccgtaaatcgcattttcttcttctgaggattgtgtcaccgcatttttattttgttctataacttttccaagttcatcttctgtcaatgtacctttccatgctcgtctgttatctgtaagttttcttgttgccataattccagtactagcatttccattctcatccacatagcgattacttgtaactgcaaatccgctaaaaatgacagcaagtatcaatgccaatccgattgcaaatacattaattttctttgaaaaaattcgttttaattctaatttaagcatcttgtttttcctccgatttttctccaaaataaaatagaaatgcatcttccagatttttttctacagccacagcatcttctgttggcttttctattgaaataattctaagctctgctccggtttttgttgtttttatatttccaaccaaatattcattcatatatttgtctatcatacttctcgaaacattacattgccataccttttctttcatagaagatactaaatcttctgcagtacctgcataaaaaagttctccatctttcattaacataatgttattcgcaatgtactcaatatccgatacaatatgtgtagacaagagcaccaaacgttcttccgacaattcactaattaaattacgaaaacgtattctttcattcgggtctaatccggcggtaggttcgtccaggacaagaatttgcggatcgtttaacatcgcctgtgctattcctacacgtctaaccattcctccagacaaattcttcatttttcttttactgaatttttccattcctacttgatttaataattgcttcactttttttctggcaaacggcatttttaacccttttatagaagaaatgtacatcatataatcatatacggtcaaatctggataatatccaaaatcctgtggtaaatatcccagaacttctcggtattcacctcctagtttccatatatctttaccattccataatatttgtccttctgatggttgaacaatcgtacaaagcatacgcattaatgtggtctttcctgctccatttactccaagcagtccataaattcctttttccataacacaatttactttattaacagcatttacttctccgtattgttttgttacatttttaaattctaatttcatacgtgtaatcctccaaaattttttcatcaaataccaatgacttctgaacacaaaaaacaaaatatacaaaagtcaatatcagcatagccacccataccggagttacaattttctgataaataacatcatttgcaacaatcatcatccataaaccaacccataccagacaggaaagcactgctatatattctgatttttcccatctgctgtacaatacacgaaaacatatacaacatgaaacatttactggaagcaaaaaattaaccaccaaatcacttaacgagagtattgttgtttgatatgtaattgccaaaaacaccataacgatcaccagatccactactccaaacattaacattcttgctgtacaaatctgacgcagtgtgtaataagacgcctgctcaatttcaatcgcaccatttcttctgtttttccaaatttccgggacaatcagaaccacaaatattgtggcagatattcccataatcctcatcatatcttttatgtctgacgtataattactcaacaatatccatagacacataagaatacaaccttgtaaaatccaccatcttttttttatgaattttgtctgctcatacaaaaattcaaaataagatgttctatgcgattgtttcgataaaattgactctgacaaaatattctgacatgcttttactgttctgttttctgcttcaatccttacatattttttttcaatctcctctttatattcctttatttgttgcttatatttcatcatagtttttcacctccaactctttcatcaaaagttcttttgctcttccaattcgatattttacaagcgaaagttttatgtgaagtaattctgcaatttctctttgtttcaattcttgaaaaaaatataaaactgccgtttctctaatttcttccggtaactttctcactgcctgttcaatagttaatcggactcctagctcttctacatgatttttactacagtcctctgattttagcagttcctctgatggaatatcttttttctttttgtaataatttttaacggtatttccggcaattgtataaagataattcttaacttttccatattctttatatctatataaattggaaaagaaacgtgtaaacacttcttgtgtcaaatcctctgcctcatagggatcattgatatgtagcaaacaatattgatatatacttgggtaatattttttgaccagtttttcacacgcatcttcatctcctgctcttgctagatgtactaacaaagaatccattttatacttcattcacttattctccccttcgttttctacataatataacaatcctaccgtagaaaaagttagtattttaattaattttttattcaattttagctcaattttccctcaataccttttctctttgttttttgtataaaatacggcgaaatcagcctgctcggactaagaaaaagtcacatgatatggaattataaccgtctttgaatagataatatgttcttacaaatctcttgttcaaaaatgagtttttcaaaaaaggcgtatggatttaaaacttccatacgcctttttatattccgctcttcaaattgtctaaaagttgactaaaaatatatcaccgttcatacgatgcaataatttctttgctatccgctgttttataatcaattgttcccaaattaccaatcaaatcaaatgtcatatctgcattaacctgcaattcatcttcaagtttgactgcagacggctcatcttttagaaaaactgttaatccataaggctctgtttcagactgtatctctatactgtcatatgagtatccctccggatactcttgaccgtttacaatatttataacattcgaagaatctcctacataatctgtcttatactgcgatagatcaggaatttcgtacagtttttctttttttccacacgtcgaaatcaacattatttacacggcaactaacataattgcaagtacttttttcttcatagaagcaccttccgaaagctttattcaacacttttcgatttgagtaaaagcccaagggactttaatgtcccttatgcttttctcttttctttcgctgtttcagttcaaacattcgctgctcttctgcctcttttctcttgcggcttttctctttgcgttcctgcttgttctgttcctgctgtaatttcaacgcctgttgcgattttgtaccaatgcctatttccagcatctgcttctttacttcccgctgcatccgtttcggatttcttttgatatcctttacaacattttcaacaaccggactgaatttcaaactgaagtaccacttttgaatatattcctgcacttcacaatcttttggctctgcaccaaatgttacctttgccacagatagcttaccatcttcgatgcgttcaaagattcccacccaaaacggctcttcaaaaaatactgtcagctttccatttactttgtccataagaatccctcctaaaattgattgaacaaagaatggacaacccggaggggcaggttacttaccctatttatataggacggccgggctacctaccggctctggcacaccaaagatgtacgttgcgtttttatctttgcttttataatcaagccatatggcacgattaacttaattctgtaacttctaagttacatttctccaaaacattcttcttacttcataaaattctatcttctgttcaaatcataccatatgattaatgcattttctatatactttcttgataaccagcaaaaagctcccaaaggagctttccatgctttaaatatacagtaattctcttaatacaatctcttctgctgcattccatatttcccatgaagaatgttgtaaattagtactatccacaacgataacaggtaatttaattattcgtattttttcccgataatgtaaatcgaaactaccataccacctaatatcataattaagaaaattttattcaaaatattccataaagctatattgaagcaattgattattataatacctacaagaggatataaaacaaccgttgcaagtgtccatatttttaaagttgtgcagatgtacatccaatttccattgttaaaggataaacccactagatgtattctaaaaattccttgtgaaacataatttatcttgttggcatcataatatgttggtaacatgtctttggcaaagaaacaaaaccatgcaccaaataaaagcattaaccctgtaaccagcaatatatcccctttcatctcagctaatgaacttccagatacaactaagataataatttctgtaatagatataaaaaggcataacaaatatgctaatatccagttttttctatgttgatgaatagaatccctaacagccatatcgagagaacctactaccaattcctcgatttcttttctatcaatatttttctgtgtatctattttttctccacgtaacaattctgtaacggtaacctctaatatatcagctattggtatgagtaatacgacattgggcatactaagaccacgttcccatttgctaactgttttatctgatacatataatttttcagccaaatccttttgagttaaattcttttcctttcttaattcggttacaaataaaccgaatttttcattactaatttgatacatatattcacctcctgcacacatattataatgggaatatgcataaatcaatcgactagcagtagaattgtaatatgcttcttctttgcccccttataaacaccaaagctgaacaaataggatttttcttcctacctgttcagctctttgttcacctgtaaatcaattcatttaacacaatctcttctgccatattacgaatacattgcattcgttgactcatatagcaattcttcaaattctagtcatctgcttcctagtattcgttgacttatataataattcttcactttccagtcatcgaatcatccaactattgtcctagtttggacaataaaacacatgtctccacatgcacactctgcgggaactgatccacacctctacacatcttgatctcgtatccattcgcacacagatacttcaggtctctcgccaatgtcgcactgtcacagcttacatacacaaccttctccggctgcatcttcacgatcgtctccagcagtgtctcgtcacagccctttctcggtggatccacaacgatcacgtctgcatgagctgtctcgccattatgctctcgctcatactctgcataatattccggcagaacttcttctgccttcccaacgaaaaattctgcgttatcaatcgcattaatctttgcattttctttggcatcatcgattgcctgcggcacaatctcaactccgtaaacctgttttgccttctgagcaaggaagagggaaatcgttccgattccgcagtacagatcccacacggtttcatcacctttgaggtctgcatactcaagtgcaagtccgtatagtttctctgtttgtaccggatttacctgatagaatgataatggggaaatctgatattttacatttccgatataatctgtaatatatccctgtccccagagaatttcataagaatctcccataatcacattatctcttcgtgtattcggactgatcgtgatacttgtcatgccctcaatctgaataagattttcaatcagacgctctgctttcggaagtttctttccgttgatcacaagacagaccataatttcttttgtcttgaatccatagcgaatcaatgcatgccggatcagaccttttccagtcttctcgtcatacgatttgatcttgttttcacgcatatattgtaaaataatctcaagaatctctttgttctgctctacgccaagagcgcaatctgtgtttgcaatgatatcatgtgttcttccggcatagaatcccgtgatcggattgccttctttgtccgttccgaacgggaactgtgctttattacgataaccaaacggatgctccattccaacaaccggctgcatcactgtatcaatctggtcttttgtgaacccaccgattcgttccagattgccacgaatcttctgatccttaaacacaagctgacgatcataagacatttcctggatctggcagcctccgcatcttctggcaaatgcacactttggttctacgcgatattctgacggtgtgataactttcatcaatctggcatagccataattcttctttgccttcatgactttcgcttcaaccacatcaccgatcactgcgtctttgataaagagcgtgtagccatccacatggccaattccttccccgctcactccgatatctgttatttcaactgttacaatatcattcttgttcattcttttctctcttctattttactcttaattatacaaagatgttggggtcaaaaggtattttgacccctatgatacacggattgcttcgcatttcatgctctcgcaatcctaaaacacctcaaatccgctcatttttctacgaaaaatggctacttttcggtgttttgcgggtcaataagtcatgctttttcatgcaagcaagaaacgcatgaccttttgacccttgtatcatacaaatagccactgctcacatagattctgcaaacagtgacatttgttgttctcattgttagatttaatcctcggatgctcttcttaaattagactcaaacaaacggttatatccaagccattctgttcctgtttttcctttgaacagttctgtcaatgtctgaagctttgcatctgttgaatctgccatattcagtgccactgcctctgccagtgccggtttctttggagaaccgtattccagttcaccgtgatgtgccacgatacaatgcttgagttcatgagcaagcttcaccggaaagtccgggatagaacggatcgcatcatcgatcatctcgacaccgatcacgatatgtccgatcagctgtccctcatctgtataatcattgtccggaaaatcagaaagttctttcacttttccgatatcatgaaggattgcagagctaaggagcagatctctattcaaaatagagtagcttgttgcaaaataatcacacatacgagttacactgagtgtatgctcaagcaatcctccggaaaatccgtgatgtactgtcttcgctgcggaatgtgccttgaattttttgataaatgcttcatcttttatatagtagaattccaacacctgtcttaaatatttgttagagatctgacgaatataagctgtcagttcctcgtacattccgtctacactcttatctgttgtcggcatatagtctgccggattgtattctccctcttccgcctttctgatctgacggatgttcaactgaagatttccattataattgatcacatctccaaaaacttcgataaagtccttctcatcataatctgcgattccctgggagtttggatcccatacttttccatctaatgttcctgttttatcctgaagaatcagattatcatacggctttccatttcttgtctctgcggaacgttttcctttacaaagatatacattcctgattgtttctccctcgcataatccatctataaatctcattttctgcctctttcacttgttattctttactttcaatcgtaatatcaaatttaatatctacatatccttcagatcctcggcgtttcccttccactttgatctgatctcctactttccatgtcagcatcagtttacggtaagcactcatgcttacaattttctctccattcacagaacagatcacatctccactctgtatgcccgctgccattgcaggtgaatctgctgccacgtcaatcacatagattcctgacggcatgccctcttcttcctgaattccacttgtcactgctgttcctgacacaccgatatatggtacacttgcaccgttcgctaacagctggataaccaacttcagatctgaaatcgcataagcatttgcggtgcgtactccccggtctttccagatatcagaagaaatcattccgatcacttctccatccagattgaataaaatacccgttccttcggatgcactgctcatatcagtcgcaatcacactatactctccgtcgcgtccgatttctttatagtttgacgaactgacaattccgtatccgcttcctccggcataaccgaaaatatttcccagtgcgaatataacgtcaccctgttctgtcagattcgaattgccaagtgatgctacacttgaagcactccatgtggcatctgaaaggctttttttatctaccgcaaatattgcaaatccactatttttatcctgctttttcaagcttgccttatattctgatttatctgaaaatgtaacgcaccactcttttgcatcttcgcagatcgaagcataggacaaaatcagtatctccggtccgttatctgcaacgatcacaccagatacgctctcatcaattccggtcgcttctgcattccagttctcctgttctgctcctttcgtaacagataccacactcttcttcgctgtcagtgctttctcatatgctttggacatcatctgtacataactgatctcctgctgattctgcgcgtcattctgctctgtcgtgtcgtcaccttctgctaaatcttcctctgattgattgtcctcctggattgtcacaacttgtgtcttttcaggaaataaatgctgtgcaagcgggcgcaatgcaaagaatcccaggcacgcagagcctcctaaaaccagtccgcatattgcaatccggatgagctgtttcattccttgctgtctgctgatcttctttggttttatcgtctcttcgagaaatgcaaaagattcctttttttctgactgttctaaatttttcccgtcaggaccctcttccggaacctgaccattacttttcttttctgacattgacatgaacctcattcgtgactgttcacttccgtgtcaactacaaaatcaaccgacacggacatttccattacttagtataactgattcatatagattgttcaatatctataaaagccttttatttaatgaaataataaggtacaataagactcggaaatagttattgttcacatgtattgtgaacagctacatgattaaaaaattagtattaagttgaaatgacagaggaaaataaatgaatcaaaaaacattatttaaactggaatatgataagatcattgctcttcttgaaaaagaagcgacatcttttcgcggaggacagctctgccgtcgtttgaagccaatgaccgacctgcataagatcaacacttatcaggaacagactgctgccgcttatacacgaatcgtgcaaaagggacgtatctcgtttggtgacgctgcaccggttgaagagtccatgaagcgtctggagattggtggctcactcagcagcacagaacttctccgtatttcccgcctgcttgtaaatgcagccagggtaaaggcctacggaagacatgatacacaagaggacgcttgcgactgcctggatgaatattttaacctgcttgaaccactgacaccactttcaaatgaaatcgaccgctgtattatcggcgaagatgaatacagtgatgatgccagttccacactgaagcaaattcgtcgaagcattaataacatcaatgacaaagtacacgccactttaactacactggtcaacggttcccttcgcacttatctgcaggatgcaatcattaccatgcgtggagaccgctattgtgtacctgttaaagcggaatatcgtggacaggtacagggactcattcacgatcagtcttcaacaggttctactctttttattgaacctatggcaatcgtaaaactgaacaatgacttaaaagaactttatgcaaaggagcaggaagagattcaggtgattcttgcgaatctaagtgaagaagccgcacaatatatcgaggaaatccgtgtggattaccgttctctgacggatcttgacttcatttttgcacgaggtgctctggcaatgtccatgcgcgccagccggccgcttctgaatgaagagggacgcatccgtatccgcgagggacgtcacccactgctcgatccgaaaaaagttgttccgatcaccgtgacacttggggaagacttcacactgctgatcatcaccggaccaaacaccggcggtaaaactgtttctttgaaaacggtcggcttgttctgtctgatgggacagtccggacttcacattcctgccggagaccgcagtgaactggctgtatttcatcagatttatgcagatatcggagatgaacagagtattgagcagagccttagtacattctcttctcatatgaccaatattgtctctttccttaagaaagtagatgaacgttcgctggttctctttgatgaacttggagccggtacagatccgacggaaggtgccgcacttgcaatttctattctgtcccatcttcaccagagaggaatccgtacaatggctaccacacactacagcgagttaaaagtctatgcactttccactccgggtgtggagaatgcctgttgtgaattcgatgtagaaagtcttcgtccgacttaccgtctgctgatcggtattcctggtaaaagtaatgcatttgcaatctccgggaaattaggtctgccggattatattattgaagatgcaaagaaacggctcagtgaacaggacgtttcctttgaagatcttcttactgatcttgagacaagcaaacggacgattgaaaaggaacaggaagaaatcgcacgattgaagaaagaagcggaagacctgaaagcccaggcgaaacagcgccaggagaaattagatgatcagcgcgaccgcattttacgcgaggcaaatgaaaaagcaaacgccattctgcgtgaagcaaaagaaattgcagacaagacgatcaaggatttccgtaaattcggcaaggaaaacatttctgctgccgagatggaaaaggaacgcgagaagctgcgtaagaagatcaaagatacagcatctgcgtctgcaatgaaagcacagaaaccaaagaaagagcataaagcatctgacttcaagctcggagaatctgtcaaagttctcagcatgaacctgacaggaaccgtaagctctctacctgatgccaaagggaatcttaccgtacgtatgggaatcctcagttcccaggtcaacatttctgatctggagattatcgaggaagtctctccatatgcaccgaagaaaatgaaccgtacttcaaaaggcaaaatcaaaatgggaaaatctctttctgtccggcctgagatcaatctgctcggacgtactgttgatgaagccgttgctgagctggataaatacctggatgacgcaatcctcgctcacctgaatactgtccgtgtagttcacggaaagggaaccggagcactcagaaagggaattcatgaatatctgcgtcgtcagaaacatgtaaaatcctatcaccttgccgaatttggtgaaggtgacgcaggtgtaacaattgtagaacttggctaattattttaaacagttaccaactaccttatcatggttaatgggggaaaaagaatgtttggaaaacagaaaatcctaatcgtagatgatgatgagaatatcgctgaactgatttctctttatctcacaaaagaatgttttgatacaaaattagtatatgatggagaagatgcgcttgcagcttttgacagctatcaaccaaatctgattcttcttgatctgatgcttccgggaattgacgggtatcaggtttgtcgtgagattcgttccaaagctgccacaccgattatcatgctttctgccaaaagtgaagtatttgacaaagttctcggactggaactcggagcggatgattatatcatgaagccatttgaccctaaggaaatggttgcccgcgtaagagctgttctgagaagatatcaggttggacaacagaatgatacttctgttgaaaaaacaaaatgtgcggagtttgacggattgacgatcaatcttacaaactactctgttgtgtgtgacggacatcctgttgatatgccgccaaaggaattagaactcctttactgtcttgctgcatcaccgaatcaggtattcacaagagagcagctcttagaccgtatctggggctatgaatatatcggagacactcgtaccgttgatgttcatattaaacgtctgcgcgaaaagattaaagaccaccctcactggaatatcagtactgtatggggaattggttacaaatttgagacaaaatagatttaaatcatcggtcctggatactgtaaacagcatctggtggccgatgagtacttagggagaaattatgaaagcagttctgcatttaaaatttattgtactttatattattttcgggtttttatgcgttttcacaacagcaacattaaccacagaactgatcaccgaacgtctggaaaaagatacttcgcagacattatacagagaagcaaccatgattgcagataattatctgccttcctatttttcaaacgaatcttccagctgggctgttcattctcagttatctgctatgaagacgtatcttaattcttctctgtggtttgttgaaaaagatggtacaatgatcacctctgccaacctgaaggatactactgcgccacaatccgtcaataattttgatccggccgaaatcgggagcaaccagtacatgatcggaacctatcataattattttcaggaagatatgattactgtaatggctcctgtcacacagggattttatacaaagggatatctgatcattcacagcccggtctctctgatcaacgaaagatgccgcacgttgatggttccggtttatatttctcttggagttattttcctgttgtccttcatcttcctgctcgggttccatttcttcgtccaccgaccattgttgctgatcacagaagctgcgaagcaatatgccatgggcaatctggattacgagattccggtaaacaggcatgatgagatcggatatttatccgcatcactgaattatatggctacacaactgaaggactctgatgattatcagaaaaagatcgtagcaaatgtatcccacgatttccgttccccgttgacttcaatcagggggtatgtagaagcaatgacagacggaacaatcccaccagagcttcatgagaaatacttaaatatcattctcttcgaaacggaacgactgactgacctgacaacggatcttcttactttgaacgaatttgatacaaaagagctccttctcaataagacttcctttgatattcaggagatgatcaaacatactgcccagtctttcgagggtgtctgtactcagaagcatatatccattaagctctttctactgtctgaacagatcaatgtaatggcggaccgacgcaaaatccaacaggttctttataatcttctggataatgcgattaaattcagtgagaatgactcttctattacagtagaagtaacaacgaaaaatgataaaatctttgtttccgtaaaagatcatggaatcggaatctcaagaaaggaaatcaataagatttgggagcgtttctacaaatcagatctttcccgtggaaaggataagaaaggaactggacttggactttcgatcgtaaaagaaatcatacaggctcacgatgaacatatcaatgtaatcagtacagaaggggttggcaccgaatttattttttctttaagcaaagcttaaaggacaacgtgaataaaataaaaaacatcaggatttatacttcattctgaaattcagaaatatagaagtaataaaatcctgatgtttttattttgacaagctcttttcctttatgaaattgttcgacttattttcaacttattcgtaaaggaacggtgttatcgtatcgtcattcatattgtctgctgtcacccacacatatcctgtgttgacctcagcttcatttccaatctcaagaactgtacgtgccgctgcaactactgtcgcatatcccattccaaaaggattctgcacaataagtccatccacctttccatctttcaatgcattaacctgctcttttcctgcatcaaaccccactaatgtaatatgtttttctgcatcaagctgatccatcgtcttaattgcaagctgggttactgtctcgttcgtagcaatacatccttttaaatcaggatgtttctccatataatatcgaattgcatcttcatcactcatctttgccgcgccatcgttgacctgctgcatcttctcggacaattcattgtccgcttcctgtgctgtctcattcgcactttcgtctgctgatgaagaatccgcattcgatgctgcatctgcaattgtctcggaagcatcacctgttcctgttgtctcttccttcttttctcctgcttctgcggctgccagttcttctggtgttaccccgacctgttcagctacaatctgtttcttcaacatttccagctgatccagataaattgtctctgtaacagtcacattcggatgatttgctgcaagttcatttttgattcctgcctcacgctctttcgccgtatctgatactgtatcatgcacaagcaacagaatctccccactgtcaccgatcttctcacagaaattctttgttcctgttgttgccgcttctatattattcgttttgcaagtactttggatattctgatagctgtttcctgaatcaaatgctacgatcggaattccattctcaatcgcaagatcaaactggacggagcatgcgcttgcatctacactggaaattgcgatcacatccggataacgtgcaagctcttcatccagaatattcacctgctgatcgatattatcattctcatccggtgcactgtataatactttcaccttatcatttccggaatagccaagtgctgtattcaagtcagttgctgcctgctctacccctgcctttacctgattccaatacggtgttgaagatccccttccgattacagaaatataagttccaggttccagatccagattgtctgccgatgcatatgcagaagatttaattgcatccagatttgcctgatataccggtgcttctgtcttatcccctgtaaaaaccggatcatctgccttctttccgcagccggctgcaagtaccgtcatacaaagtgctgccgcaatcgctgctcttacatttcgtttccgcataactttctccttcttttcatttacacaattttatctctatgttttctactttttaactctcaatccattatgatacacgaatccttgaaaaatggaagagataatttcttaaaatctcgtgaattttcgtttttttactaatttagtatagaaatcttctattttccacgttcacaagttctataaaactaacttatgaattactcaaataaatacatcaggaactcttgtatatttccccgtcttgtattaaaatgaggataacgaaaagggaaaaacctatcgtaatccaaaaaaggagggtacatacaatggcacacgtaattagtgatgaatgtgtaagctgtggtacttgcgaaggcgaatgtccagtaggcgctatttctgaaggagatggcaaatatgagatcgatgctgatgcttgtgtagattgcggagcttgtgaggctgcttgtcctacaggcgctatctctgaagcataatttataagcgctaagtgatcacaaaacgcagaagtcctgcccgtctgattgattcagatgcggcaggatttctttttttacaacttttttccttgtattccatacctttcttcaattaccattttttgccataatttgacgaacgattagcacttctttcataatttctctatgctataataaatgtagcgaaatcagaacagtaatcgcaatgattctaacaggaggatagaaaatcaatgggtgaagtcagatttatgatttctgaagccgccaagaaagttcaggtagaatcccatgtcttaagatactgggaagaggaacttcatattccgatcggccgcacagagatgggacatcgatattatacccaggatgatatccagctcttttgctgtattaagaaacttaagaatgaaggggttctgcttcgcgatctgaagccattgatcccagaattgaaatctacacgtcagataatgagacacactgaaaacaaggataagaatgcccttaccaaaacacccgcacctgatttggcatctgagtgcaaaccggccaccaccgctgctccggtcgaagtcatcacagaaacccagctggaacatgtacgttcactcatcggagaagtgctgactgaagtcgttactgaaaataacaaagcattagaaaaagaaatcagcactcaggtcaccgcagatgtcatacgtgagatggattttcttttccaggcgaaagaacggcaggaagaagaacatttccgtaaactggacagcctgattcgccagcaacaggcgacccgaagagaaagtgtgaagaatagtccggtgctgagattcaaaaaaagatttacatagcatttctgcgatttctaattgcacactgcacataccggtagatttattggatttgtatatcgaaaaaagacaggcactctccaacaagtgcctgtccttttcttttttatatctcctgatcctgctgacgcagctcgtttccaaaacgagtgtactgtggcatccacgcaagacgcactgtaccgatcgggccgtttctttgttttgcgataataatttctgcaatgttcttatcttccgtgtcaggattataataatcatcacgatagataaacatacagacatcggcatcctgctcgattgctccggattctcggaggtctgaaagcatcggacgcttatctgttctctgctcaaccgcacggctcagctgtgacagtgcaagcaccggcacattcaattctctggcaagacctttcaaagaacgtgagatctcagaaatctcctgctgacggctctcattctttcttgaattgcttccgctcatcaactgtaagtagtcgataatgatcaggtcaagtcccatctccagcttgtattttctacactttgagcgcatctctgaaatcgtaatacctgacgtatcatcaatgatcattcttgatgatcctattgttccggctccttcgatcaacttctcccaatccgtatctgacagattaccggttcttagtatctgtgcatccacatgagactccaatgagaacagacggtttaccaactgctctttggacatctcaagactgaagattgctactgctttattctgacgaaatgccacatgctgtgcgatattcaatacaaacgctgtcttacccatggaaggacgggctgcgatcagtacaaggtctgagcgctgcagaccggacaacttataatcaagatcaatgaatcctgtcggaattcctgttactgttccttttgtcttagacgcacgctcgattacatccaatgcattgagtacaacctgcttgatcggtacatactcttctgaattcccagtctctgcaagtgcaaaaacctgcttctgtgcatcttccagaatctcctctaatggctgattctgcagataacaggcatttgccgtctcttcatttactttgatcaggcgacgcatgattgatttttcacgtacaatttcagcatagctcttgatattcgcagaagtctgtgttcccatcagcaaatctcttgcaaactccatgctgctgatctctggcgggacatccttttctttcagatattcctgcaaggtgatcagatcgaccggttttcccgcatgaaacagttccaccatagaattaaacaagattccatatgctgtctgataaaaatcatcccctgataatatctcggaggccaccgtgatggcctccttgttcatcagcatcgcaccgagcactgcctgctctgcctccgcactgtgcggaggaattcgtttcattgctgcttccatatccataaagatttcgtctccttatgcttcttcctgtacaactactttcagttctgctgtaacctgtggatgaagctttacagacacgttgtgtgttccgagtgtcttgatcgcttcttttaactggatcttctttttatcaacattaagattcaactgtgcttttacttcctctgcaatctctttgcttgatacagaaccgaaagttcttccgccttctccaactttgatgtgtgttacaattttagcttctgcgatcttagctgcaagttctttcgcagcctccaggttctcctccgcaacttttttctcgttattcttctgaagcttcagatcattcagattctttcctgttgcttccagtccaagcttctttggaagaataaagtttcttgcatatccatcatttacgtttacgatctctcctttttttccaagagattttacatcctgtaataaaataactttcattgtcaaatatctccttcttctatcattttatcaatggtctctttcaatgcactgactgcttcatgcatattcgtgtggtcaaactgtgctcccgcagaattaatatgaccgcctccaccgagcttctccgcgataatctgaacattcacttcatcgatggaacgcgcactcatataaatcttattttcatattctgtcaatacaaaagaagcctttattccgctaatatccagcaattcattcgccgcttgtgctgcaagcactgtaggactgtcaatatcgcttggacatactgcaatcgcatattccttacgataaacttctgcattgcggactgcctcagcctttgcctgataagatgccatatcatcacggaacatcttgcgtacccgtgtaatatctgcaccgcatcttctcaaaaatgctgctgcttcaaaggttctcacacctgtacggttcataaagtttctcgtatcgatcataattccggcatacatgcactctgcttcaagtgccgggaatttgatgtcatctaccatatactgtagaacttctgcgatcatctcgcaagtggaagaagaatacggctccacataagaaagtaccgcgttctcaataatattactactctgcctgtgatgatccagcactgcaatcatctttgatttcttcaagagttccggacactctgtcatctgtggcttgttcgtatctaccacaatgaccattgcattgtcatccacataatccaatgcctgttctgacgtaataaaaatatcatcctcatatgcagggctctccagaatctcatcatacaacggacgaacagatcctgtaacttcattgatcacaatatgtgcctttttctccagacttactgctgcacggtaaatacccatacatgcaccaaaagaatccggatcagcaatcttatgacccataacaataactttgtctctggtcacaataaactctcgaagtgcctcagccttaacacgcgccttcactcgtgtattcttcgctgtctgctccttcttaccaccaaaataagttattccgttacagtccttaataactgcctgatctccgcctctggcaagtgcaagatcgattgccacacgcgcatactggtagctcaacgcatacgttgccgtattcaatcccaaaccaatactcagtgttgctgatcttgaattaccgatattaacctgttttacctcttccagaagagaaaacttgtcttctttcagctttttataagcatcctttcgaagtacgataaagtatttatccttctccagtttctttacgataccatctacatctccgatatacttattgatcttacggtcgatcaatgccacaagaagggattgtctgacttcctcaacactctccataacttcatcatagttatcaatataaatcaatccggcaatcattcgctgatcttcgttctctcggatgtaggcattcagttctgttacatctcttaaagaaactgcaacaaaatattcctgctcttccggaatctgaagcaactcttctttctcactaaatccctccaatgatacttttcgaagctctgcctgataacttctttcacgataagttacttccaattctacatgatccacatcattttttggaaacacacccggatgtaattctggaatcatacggttcagataacgttcttttctctgaccctctgtcagattcaaaaagcaatcattcttccacagaatcctcccatcctccagcgcaatcgcatagggaattgccagttctttgagcaaccggttttcaatacctttatactgtactgaaaactggatcagatctgccaggatcaaagatctgttatagaaatacagcgaaaaagcgattcctacatatataattatgatcactgacatcaaaagtccggctttcttgtccaccatgtacatccatacatccatgccaatcaagagaagtgtcatgatcagcggccatcgcatgtacattctgagctgtcccttcagctgcattttattccttttcataactaatacctcacctgggactactatcaatcaccatcatctgtgactaattacaatatagctaatctattatagcatcttttcccctaagatgctataggttgtattatgcaaaaaacacgcaaaaatgaattagaaaaagcaaaaagatcgaatttctgaatttctccaaaaattcgatcttgctattagctaattatctcaattagtcctgaacgtaaggcataagagaaatgtgtctagctctcttgattgctactgtaagagctctctggtgcttagcacagtttcctgtaattcttctaggaagaatttttcctctttcagaaacatatttttttaattttgcaacgtccttgtaatcgatttcgttgttctctttaccacagaacacgcaaactttttttcttctacgagctgggcctcttcttttgaatccaccctctggtctgcttcctttttcgtaagccatgatggttatctcctttccgacttagttaaacggtaactcctcatcgataccatccgggatattcatgaagccatcacctgcatctgcgctaggtgccggactcggtgcagactgacgctggaaacttgctctgttagcttctgcctcggctctgctctctgcaaactcctgctcttccacgatcacttctgttgtgtatactttcacaccatctttgttcgtgtagcttcctgtctggatacgtccggaaatagagacacgcattccctgatggaaatacttctcagcaaactctgcggaacgtccgaatataacacacggaataaaatccgctgtcggctcaccgtctcttctgaatctgcgatctacagcaagtgtatatcttgcaaccgctgtagcattgtctccctgtgaatatctcacttctgggtctcttgttaaccgtcctactaaaactactttattcatatatacctctttccgcttatgcttcctgtttcacgcataaatatctgagtacattgtccataatgcggatacgctgctctacttcagctggaactgtactttcagcctcgaagtggatgaagtaataaaatccttctttcattttctggatctcgtaagcgaatcttctcttgccccactcatcaacgtctgttacattaccgccgaaacgagtgatcattgctttcactttctcgattacttctgctcttgcttcgtcttcgagttttgcgcttacaacaacagctaattcatacttattcatcttattttacctccttatggtctcttggcccccggttcctcccgggaacaaggaaattgaatgactgagtggaattgttccatcagcatgtcacagtttcttataataccataaagaatttgttgtttcaagccttttttgtaatttgtcttgtatttttttctaccaattttcttggcaccataatctggtgcccgcagcccatacatttgagacggaaatccgctccggcccggagaatctcccactcctgacttccgcatggatgcggtttcttcatcttaataatgtcgcctacatcaaatctgtctgccattctaattttctcctccgtctgtcgctgtcaacactccctgcaaaaggaatctctcatcttctcttacattggtacaagttgaaagactgacaatctgagactgcgcattcacttctgttcctgtgtcatatgctgaatcttctttacacattttcaaataactctcaaacgcttcgtctgtcgcataagtcagattatactgatctgcagtatccttcacgacagctgctgaaaacacggtataagtccttgtttttccatccggtgtataaatatagaaattcggatgttctttatagaaagattcttcctcatactctttcagctgcgaaaacatttctccgccaactttcaggttatgtccataaatcattgtatttctatctgaaaaatcactcttatttttcatgtccatgaaaattgcacccagtttattatcatttgcggaaaacgtctttgtcagatattctttgttatctgcactttttacaaccggataactgatgattgatggttcatcaaaccggatccaggctaccgtatctggattttcctgcaaaagcacatcaaaatctactttaaatgtgtctcccgatacatctcccggatcatctgtttgctcctgtacagtgattgctttatttttgagcttatcatactcttttccaccagaataatatggcaccattgtgcgtaccagctgataaagcgaaaatgcaaaaacacagactgccacaaccaggaccaccattgttactttgtcaaataaaccgctttttttcttttgtctgcttcgtttctgtcgcttttctaatctgtggcgcaccggcttctttctattttttcccattctttttcccttctccggctactagaaaccaagattctcatctacaagaataattttgaaacgacctttctgacggctgaatcttgttaccagaatctgacaacagatacattccgggctcttacagtcaaagcagcttccagccttggaacatggtgtgtcaattccaaaacgctgtgcatttacaggtgcagcttcatttcttgccctgctcattgcatcttcctgtgtctttacaactttgttcataccaacaattagaagtacattctttggtccaaatgcatatgctgctacacggtttgcatttccgtcaatattgatgaacactccatcttcactcatcgcattcacacttccaagaaaccagtcacaggaaaatgctgctctcgcgatttcctgtttctcttccggtgtagctgctttatctctgtcacagaaattatagtttccggattttatcgcgtcaatcagaccgcattcgtgtacggaagaggcacctcccatattgatcgtacttccttccggaatccactccagtgctttctgcactgcttcttcctttgtctcagcataataagcatccatatttctggattcaagtgctttcaccacacgttctccaagtactttgtttcttttctgtcttacatccatcttaattgcctcgcttttattttgtgttatcaacatgcattttcattttttgaaaagttattcacaatttgagtaactgttcagagccaagcaaaatttcaaaaaacaggtgtaaaatgcttgcatttttaagactgttttttgaaattttatttggcggatacgccacaccgacgaaatgcgtagcattttggaggttggctctgaacagttaccaatttgaattgatttttccctgctttttcaacagttcatgaatagtatatgccacccctaagtcttcatttgactttgtgacatattttgaaacccgcttcacttcctcatctgcattttccatcgcgacagttgctccaaaatccatagacaacatagagtaatcgttcaggctgtctccaaacaccatcacttcctcttttgtataacctaaggattcaatatattcctgaatcgcaggtcctttctccgctccttttaccgtgatttccagattattatagaaggaagacgcaactgcgagttccggattctgcatcagtcttcgcttgatcttatcaagcatctccagatcgcctgtaaaaaggaaaatcttatggatcataattccctgtttctctaattcgtccacagaatcgattcgtcttgaacttgccttcactcgcttataaagttctgactgctctatttggtctctgcactcagataaatggaacagctgaatctgacgaacaatactctcctctacttcctccggtgttcccacacgatactcataaggtccggcgcaatacaataccgagattggatattcttccaatacctttgccacctcattgcagagctcatatgtaaatcctatgctttttagaatttcaccctttgggttgcgtatctctgcgcctgagcccacaatgaaatcacagccaagatccagaccttttaattcttccattgctccattataacttcttccggttgctatcataaagcggattcccgccgcctgtgcttcacggatcgcttctactgtctccggtgctactttgtgattgtctccaagtagtgttccatccatatcacttgctattactttgatcataatccgctttctcctgttaaaactttcttgtcttataaatatattttttgcctttgcctatgagtataactgtttttgtgaagctgtgcaagacatgtctgttgaagttaacctgttgtttttaaaacctttactgctttcacgatttcttcttccgaagtctgccaaagcgcataatctccacgttccgacaatccaagtccgattccttcttttctatatttcatcatactgtccactacaatctttccagacatatgataagaagtaattcctgtatacggaagtaatttttctattgattctgcaccaattccgcttgccgcaaggatctcaatccttcctgcacttttctcctgaagtgctttcagcatctctttcccttcccacgcagtttctttctgtccacttgtcagaatcgtatcgaacccaagatcaatcgcttcttcgagtgctttcatcgggtctatacagacatcaaatgcacggtgaagcgctttttctttatttcctgctgccttgataagttctgccattcgctctgtatccaatgtaccatccggattaagcattccgatgacaactccatcagctcccatctcacagtacatctgaacttcctcttttagctgttcaaattcatattggttatagcaataatctccatatctcggacgaagaagaactctcgtcttgatgtctgtatatttcttgacaagatcaaataatgccttccccggagtaagtcctccgatcacaagattgctgcataattcgattcggtctgcgccacctttctgcgcattgatcgctgattgtacacaatctgtgcatgcttctaatattattgttttcatatgttctattttccttcaataatttttatatattagaagaagctgccgttggcagcttcttcatggttcttatcgtttactaagaagtctctctagacacaagctactataagctttaaccgtatgtcagttgatgacctcttgcaggcattttacaggtactttgctgcctcttcatcacagatcactgttacatgtggatggaactgtaagatacttccaggtacctttggtgtaaccggtccgtttactacttctttcaggatctctgctttattctctccgtttacaagaagtacgatcttctttgcacgcataattgttccgatccccatagaaactgcttttctcggcacatcttctttcttctcaaagaaacgcttattcgcttcaattgtgctatctgtcagatcgatctcacctgttacttttgtaaactcatctgccggctcgttgaatccgatatgtccattgcatccaagtccaagcagctggatttctacctgtcctgtctttgccatcagttcttcgtaagcttttcctgcctcttcagcttcaaatccaaccccatccggtacatgtacattctctttgttgatatttacatgattgaaaagattgtcattcatgaaataatgatagctctgatcatgctccggtgccagtccaatatactcgtcaagattaaatgtagtaacctgagagaaatcaagatctccagcctcatacattttaacaagctctttgtacagaccaaccggtgtagatcctgttgccataccaaggattgttttcggattctccataatctctgctgcaaacagtgttgctgctgccttgctcatctcttcataattcttctttacaattacttccatgtttaataccctctcatttcattatatttatatcgagtgctttggaagccaccccatattttcatagatcaaatctatttgcttcctgcttctgtagatatattttataacttcttattccttatgcgagtttaccgtagctaatcgtctgtactaaatcaaacgcatcatttaatacaaccatgtctgcatcttttcctgctgcaatagcccccttagaatcaagtccgaactctttcgcctgatttccagaggtcatctttactgcatcttcaactgtagcacctgtaaattccataacattcttaaatgcctgaatgtatgtaaggatacttcctgcgatcgttccgtcttccaactttgccataccatctttcacgattacgacctgtccgcccagctcactctttccttccggcattcctttcgcacgcatggagtctgtgatcagctcgattccatcataccctcttattttgcatgcaagtttcaccatatccggtacgatatgctttccgtcacagattagctctgcgtgtaccccttctgccagcataccatatcctgtcacaccaggctctctgtgattcagtcctctctgtgcattgtaaagatgagtcacatgtgttgctccgcttgcattcaattccccgtataatgcattcgaatgtcctgcacttaagacaactccattttccttgcaccatgtctcaaatgatggatctgcctcttccggcgcataagtaacaatacgcaggagaccaccgctgatctcattccattttgccagtgttttttcatctggcttcttaatataagaaggatcttgtgcccccttgaacaccgttgaaataaatggtccctctaagtgaatccctttgattaccgggttcttctgtgccgcatcatgaatattctgcattgctttctcgatgttctcataggtctgagtcatagttgtacagaaataagttgtaattccctcctgctttgtcatctgcttaaccatctcatcaatctcatccggtgtagcatccatgttatctttcccataaccaccatgactatgaatgtcaataaatccaggaacaaccattgttcctgcacaacttacctcaagatccccttctttcggctcgaaccccgccatatcaccgacttcttcaatcttctcatcaaagcggatatagccattttcgattacaccgttcccagtataaatcttcttctccttgatcagtttcatgttgttctacctcgttttctactttttagaatactggtatctgtgaagatactgaacagatacggatctattactgttcgcagttacctacgagcagcaatagaactcttacttttctattatctcacaatacaaggtgagattccatcaatatttcataatttatgaaaaaatctctgtccgtttctactaaccgcagaactataagaaacacctgaaacaatagtagtttcccccaaactattgacaatatccgcctaattgcggtaaattaaatgttattgtgggttaaaaatgccttcaattatgattttgatacctatggattgtacaaatgctatgccttcttacaatcctgcccgatatcatcatataaaataatataaggaaaggataaaagaatatgaattgggaaatcattacttttattgcgtatttcgtcattttgcttggcgtagcgttagtattttactttaacggtaccaataagaactccgaggacttcttccttggtggaagatctatgggaccttgggtaacagcactgtccgcacaggcgtccgatatgtctgcgtggctgctgatgggacttccgggatcgatcttagctttcggtttcggacagatgtggatcggtatcggtcttgcattaggaacagctgctaactggattctgtgcgcaaaacgtctgcgtacattctctaaagctgcagatgatgcaatcacattaccacagtatctgacaaatcgttttgcaacagactccagatcactgcagttgacttgtgcactgatcttcctgtttgcttatacaatttatgtagcatctgcactggtagccggtacttctgtattcacaacactgttcccgacagtttctcctaagattgctatgttcgcattcttgctgatcattgttgcctacacattctttggtggctttgcggcagtttgctggacagactttttccagggattactgatgatgcttgcactgatgcttgtacctctcgtagtctgcatcggtcacagtgatctgttggatcctactgctcttactacagtatatgagtatactgatgctgctacaggcgctgtaacacagtgtgctttcggaggcggtatctttgatgccagctggcaggatatcgtcagcggacttggctggggattaggatacttcggtatgccacatatcctggtgcgttttatgtctatcgagaaaccatccatgatcaagaaatcttctatcgtagcaattgtatgggtaatcatctcactgttctctgctgtcctgattgcttacttaggcagaatggttatgggcgctgaactgctcactcagggaaatcagaaacttgtattcattgctatggcgcgaagattcttcccggcaggcatctgtggacttctgcttgcagcgatcatcgccgcttcgatttccactgcagattcccagctgttggtagcatccagctccttcacagcagatctgtacaagcctttcttcagaaaaaatgcttctgaaaaagagacgctgatggttggacgtatcctcgtactgatcctctccctgattgctttcggtatcgcaaactccaagggaagtggtgctcaggctatcatggatatggttgaaaatgcatggggcgctttcggtgcttctttcggacctacgattctgctgtcactgttctggaaacgctttaattaccagggtgctgtagcaggtgtaatctccggattcgttgtagatctcggatggctgctcacaggaatgacagatgccacaggtatcttcgagattgtccctggattctttgcaagtcttctgattgctgttattgtagcaaaacttactgctgagccaaataaaaaagctgttgaaatcttcgatcagggaatcaaagcggaaactgaataaattacaaatgtattataaagtcaaaaaatcagtcgtaaatatttacggctgattttttgtgcgtttatgattcatatttatcttatttatatacaaaaagaaggggcttacataagccccttcgacatttgacacctgactcacatcagtgttcaaatcatccttcaattgcgattgttttctttgtctcaactggttttgcctctttcttcggcactgacagtctcagaataccattctcgtattttgctttgatatcttcctgtgtaaggttctcacctacatagaagcttctctgcattgctccggcataacgctccttacggatgtatttacctttcttgtcttcctcatccttatcaagacccttagcagctgatacagtcaaataaccattctcaagctcaatgctgatctcatctttcttgaatccaggaagatcgatatctacttcatatcctgcgtcatgctcacggatatctgtcttcatcaagttcttagcgtgtttaccgtataacggattcttctttccccagaaatcctgctcaaatgggaagttcatccaatcatcatcaaataagttttctccaaaaatactaggcatcatcataagtcatttctcctttcaatgctaactaactttgttgccttttgtgagaagatctcacaatttatataagctgctttcgcagttgttgtcagaacattcggaggattcagaagttcatttcctttttctctgtcttcctttgttctacttattatatagcacgcaacttttagccaggtcaagaggtgagtgctaattattttgtgaagattttgtgaacgttacgagccatgcatattgtaatttcaatccttgcatataaatttactgattttgtagccatataaaacatctcctttcgtgagtaatgtttccgtctatcggtatctatttacatacatcaatccatccacttgctcctgcaacttcctccagttccacaattgtcagttttactgcgctatggtcgttgccggctgccggatagacagtatcgtatctttttaatgattcatccagatatactttgactccgtctctaattccaaatggacatacgccacctggagcatgtccgatataatcttctacttcatcaaaaggaatcattttagctttctcatgaaaataatctttatatttacgattcgcaatctttgctgttccttccgtaagaatcagaattggaccatcctctgtcagaaatgacatcgtcttcgcaatcatcccaggttctacatccagtgcttctgctgcaagttggaccgttgcacttgattcttccagttcaatgacatgatctgcataaccttgttctgttaaatacttctttgctttttctaatgacatcgttcctacttccttctttttttattatcatatccagattatgcataaaaaaacaagaagtttttctggtttagccttaaaaacttcttgtttttacaacttttcacatatatgttttcaaaaaaatgcgtgaaattcttttttttaattcagatattcaccaaccggagaagaattatactgtttcttgatctcaatcacaatagatccatcttcatttgttttttctgataaaattttgtactttgtaccacccttttccaactgtgctttatacttctcatactcttgtacaatcgctttttttgcatactctgtcgtttctccgtcatgattggaaaaacacaatgtctgagtgatacaagctgctttaatttttttcttgcatttcctcttctctttcgtttataataagtccgaagaaaaataattgtaacaaaagccggcttgtaaaagcgtgaaatcatgaggatttgcttgtccttacagatttcacgcttatttttttgcaatgccataaggaggttttatgaattccagaaacaaactggcagaaatgccaatccgtcctttactgtacacgatggcggttcccttaatgctgtctttactcgtacagtcactctataacattgttgacagtatctttgtcgccagactgtctgaaacggcgctgaccgctgcatctttggtttattccattcagttcttaatgattgccgtaggtgtcggaactgcagtaggtctgaatgctctgctttccagaaaaattggggaacataagccggaggaagcatgtcgtgctgccacaaccggacttttcctgatgatttttacgtctcttatcttttcaatgatcgggatttttctgtccgatacgattgccactaaactggctgctgattcagaacttcaggaactctgcaaacaatatctttccatcaatcttgtatattgctggggaatctttctgcaaacttatgctcagcgactgttacaggcggttggagatactgtattatctatgctgtctctgatcattggtgctgttttgaatattattcttgatcctattatgattttcggtctgcttggctgccctgcaatgggagtccgtggtgcagcgatcgcaactgtcattggccaaatagctggtgctatcgctgccttactgtttaaccgttttcgaaatccaatcatccatgtccgtctgaaaaactatcatttcatgtggcaggatgttgctgatatctaccgggtggggcttccaacaatcattatgcaggcaatcggaagcattatgacatttgtagtaaaccgtattcttcttgatgtttccgcaacagcagttgccttttttggtatctactacaaactgcaaaatttcctgatgatgccgatcaatgtactgggacaggctgccatatctattgtaggatataattacggcgataaaaactaccaacgtgtacaacagacatggaagattttacttcctaccggagcaatcattgccttgtgcggaactgttatattctggtgttttcccgaacagttgctgcaattattttctgcaagttcagaaatgctgctgctcggcattccggcactgaggattatttccatttcctttgtgatgtctgcaattacgattctttgcggatacttttcctccggccttggaaatggtatcattaacatggttggtgctgccatccgtcagcttattttactggttccatgcctttggatttttataaaaatctctggcatttcacatggctggtatgcattctggattgcagaaattattgcatgtatttacagttattgtatgtcacatagattactaaaaacaatctcacaataaatcaagggcgtgaatcgacagtagattcacgccccttaatttatttaatcctgttttattcctatcatctccttgtatcattatgttatattttctttactgaatacatcttatcacaaaatatgcaatgtcatttttatatttcataaaatgtattttcacagtcatatacattccataattatcttctcgcatctgtcatacccaagcttggaactattcagacacaacgtataattgctggcttttccccatttctgatccgtataaaaattgtaattcgccatacgccttttatctgtatctgccatcattttgacagcttccttttcttctacattatataaccccataattcgctgtgttttttccggcatatccccatggataaatacattcagcacatcatccctatccttcagaatatagtccgcatttcttccaatgatcacgcaagactccttttcagccagctctaaaataacttttctctgtgcctcatacaccaggtcttctactgattttcctgtgacgtcacgtccggcaaatgcatatgcgaataatccttttttcggcgataattctgcattttcttgaatatattccggagataaaccagacttttctgcaatctcattaatgatatttttatcataataagcaattccaagtttctttgctacttcttctccaataaaacgtccaccacttccgaattctctgctgattgtaataattctttttgtcatctccgcttcctccttaacttaaaacatcaactttattttttctgatcttctttaagaacacatatcctacaaaacatgaaactatttcagtaatcggaaatgcccaccagattaatgtaacgcccatctggccatttctgacaaatatcgaaaaaattccggccagtggcaggataatgataagctgtctcaaaagtgaaataaccagcgattccataccaccgtccaatgcctgataaatcccttgataagcaacattgattccggcaaacagaaagctgactgagattaccctcattgctccgataaaatattctcttgactgtcctgcattgaacagtgttgcgaacgccccagggaaaatctctgtaatggcaattccaagaatcattaatgtaatcgtatagatcagaccatatttgattccatcctttattctcttcttacttctcattccataagcaaatgcaaggatcggagtgatcgcatcacgcagaccaaatgcaaggaagagaacaaactgctgcaccttatagaacaaaccatatgctgtctgtgctgacggattgaactttaggatcagattcattacataaaccataatcgacatcaatgcctgtgcaatgatcgctggaagtccgattgcatagatttcttttataacaccgccatccggcttcatatatttcaccccatgctcaaactctttattcagttttatatggaaaatgaacagcaatactgcggacgctacctggccaattactgttgcataggccgcgcctttcactcccatttccgggcaaggtccaataccatagatcatgatcggatcaagaataatatttacaactgctccgaccacctgaccgatcgtggaataaagggatcgtccagttgcctgtaataacttttcgaataaagaaaagaaaataattccaaaagagatcacgcagcatatccgcagataactgacacccatctgaaaaacttctgcatctactgtctgggatgaaatgtatgctttcactccaaagatgccaaacaataaacaaaccacataaatgatcactcccaggaacagactgtttccggccacctttgctgcttttttactattcccctggccaagcgttcttgccagaagtgcattggttccgacacctgttccgattcccactgctaccataagcatctgaaccgggaataccagtgtcaatgcatttaatgctgcctcactgcccactctcatatttcctacaaatgcactgtctacaatattgtagaccgcctgcaatgccatagataagatcatcgggattcccatctggaccatcagcttattcaccggcatatccttcattttgttgctttccgccattttgttttaactcctctcttttctgcacaaaaaaagtgcgcaccttgtcttataagctggacttacgctgacaggctacacactttttcatggcgatattctatttgtaactgttcagagccaagcaaaatttcataaaacaggtgtaaaatgcttgcatttttaagactgtttttgaaattttatttggcggatacgccacaccgacaaaatgcgtagcattttggaggttgcctctgaacagttacttctattttaataagaaaacgagcagccggtaaactggatttacgcttacttgctactcgtttgtagttattatatttcctgttttattaaaagtcaaacaaaattttctttacttttctaccctctaaccaactctctgagtttatccagatctttcttatccggatgtgataaagcacggtcaaaatttgcgatcagcagatcaagattcggcatatgatccggctgctctttcattttcacataacggtctctcaccgcttgcggcatctttccctgacacatatactcaccaactatctgattgctttcatccatagaactcttaacattattcagaaccttctgaaaatatgcctctttctcaccaaacccggctgttccaaacagaaagactttcttattctttattctttgcaataactccaatgcggatttatctgcatttccctggtctgtccagaaaccaatgtaaagcatttccgataccggttcttcgatttcgcttgttccgaaataatcacaattctcctgcggcaatgcatcacgaatcgcatttgccagctctgctgtatttcctgttttgctgctgaatatgattgagtatctttcttctttcatactataaccttccttctaagctaaaccgattctggaacaatatcttcagacttcttatttctgcttaatttccataataactgtttttccagcctgaacttctccctcttcacatacaagctctttcccttcaaggcttgaaccgatgacgatcggtgtgatggaattacgtcctgtttctttgataaactcaaggtctgcatctgcaagaagatctcctgcttttaccttgtctccttcttttacatggatctggaaacattttccattcagtgcgactgtctcaagtccgacatgtatcacaacttctactccgttatcggaagtaacagcataaatgtgacctgtctctgctacttttgatacagttccgtcaaccgggcttacaaccttaccttctgccggaacgattgcaactccatctccaagaatcttctctataaaaataggatccggtacttctgtaattgctactgctgtaccggtcataggtgctaaaattgtttcaaatacattctcctgattgctcatatctaactcctccttagacgtctttcatccactcattacttctcttactaactaaaaaattatagtcactgtttctgcgaatttcaatcccattttttgatttatttgtgaattctatgttttgcatatttttccacgctagtatcgtttcttcttattcataatgatcagcaaatctctacaaaggtcttatagaaatcatataccttaccgtcttcctgtgcgcagagtagaaagcgactgatcacatcccctgttttatgatattgctgtagatattctatatgtttctgcaagtcatttggataattctcggcaacttcttctttcataagaaatgtcatatatctgccgccatgcttacgccagataatatgtgactcgtcaaacacattgctcgcgtccggcaagacagtcagaccacgttgttcctgctgcagcgtgtccgtatgctgtacgcgggaataaagatacggatcttcaatatattgaagtaacttcttctgctcaatcaactcaaaagagacaatgcactccgtatcgatctctgtttcctgataaggcgtctgtctcaatttctccaacgtcttcaccgcctcaatatgcctttgcagttttttcattcgaagtcttagcagttcctgttcctgttcaagctccgataacttctgttcaaacagatttgcctgttgtttcggtgtattggatttcatctctcggatctgctttaactgaaatccgagatttttataaaagatcacatcagaaattgtcatcagatcttctaccgcatactcccgataatgacttgtctcccctttgttcggtgatagaacctgcatctcttcccaatagcgcaatgtagatgcgggaatgtcaaagaaatgggatatctctcctatttgaaattccaaagctatattttccacctcctcttgatgattagatgatctttttctctttatcgttcatgaagataccgacatcttgctactggtattttagcaatctttttattgaccttcaagtacctttaaggtttatcctatactaagatatttttttaacaaggaggcttccttatggaaaaaactcttatatttcgttcggtagatgagattcgattaaagaaattattacgctttatcattccaacttatctgacctcattatttactacagtttatacgatcgttgatggaatctttgtttctgcttatgttggaacaaatgcactcgctgcgatcaacgttgtctatccgcttgtaaatattctgtacggtatcgcacttgcctttgcgacaggcggaagtgcgcttgctgctcttcatatcggtggaaagaaaaatgacgaagccagccggactttctcggtaagcatggctgctgccattgtcattggcgctcttgtctctgcgcttattcttttccggttgccgctcatcctgcagatgcttggtgcaacctcactgttgatggaagattgtaaagcttatatctactggtggctgttcggtgctccgatcgtggttggaaaagagatgttcacttatttcatccgtgttgacggttctccgacgtacagttttctgaccgcactttccggagggatttttaatattgttttcgattacatttttatcggacagctccatatgggaattacaggtgccgcacttgcaaccttcctcggccttctgctttctttcgtaatgggagtggtttactttgtaacacatccgaacttccttcattttacattccgcggactgtccataaaggaagcatttcatagcatgatcaacggaacttctgaattcgtaaaccagcttgcaattgcgatcacaaccgttgtctttaaccgaagtgccctacttttcgccggagaagacggcgttgctgctgtttcaatcatcatgtatttacagttcttatgtatcggaatttattttggattttctatgggactatcaacgccactaggatatgcttacggagacagaaatttctctgtctgtcgtgttttagaaaagtacgcttatcgcttctttgcgattgcaccgatcattctctacggatgcacttatctgctggcaccaattggggtatgtttctttgcatctcccggcagcacagtctttgacatggcagtttccggactgcgcttatatggactcggattcttattttcaggaatcaatatcttcgcagcaatccgtatgatgacatatggcaaaggatatatctcaggtatgattactttccttcgttcctttgctctgctgcttcttttcctgacagttcttccgaggttcttggaattaaatggaatctggctggcagttccggcagctgagatattgacactgattgttgctctttggacgttgagaaaaaagacagtagtttaacccaactatgttaaagaagactaaaagacggaggtttctgacattttgtaattagaaacctccgtctctttttcatgaaattttatcttttagaatcctactcgactgtctcccagttcattcttccatatctaagtgtcatctcctggatttccttctgcaatttcaatgacaactgtcttgtattcactctccacttccagttctttcctaccgtagacggagtgttgatacgacaattatttcctaaccctaaatagtcctgcatcggaataacacacagctttgcactgctccgcataatcaggctgatcagagatttatacagttccctttccggtgtgtactggtcacacatgtaatctctcgccagtttctgctcctcttttgtgatactgctccaccatccaacgattgtttcgttgtcatgagttcctgtataagccacactgttcaccgggtagttatgtggaagataatcattcgcacaacctgagtcacgggaatcaaatgcaaattccagaaccttcattcccggaaaaccactctcgcggaccaactcacgaacagaatctgtcacataaccaagatcttcggcaataacctgcttccatccaagtgcctgttccactttgcggaacagatcgattccaggacctttctcccaatgtcccccgatcgcattctctgccccatacggaatggaaaagtattcatcaaatccacggaaatgatcgattctgacaacatcatacatctggaatacataatgcagtcttgaaatccaccatgaatatcctgtctctctatgatagtcccaacggtatagtggatttccccacaactgtcctgtcgcagaaaatccatccggtgggcatcctgctacagctgtcgggatatttgcttcatctaactgaaacagttccggatgtgcccaggtatccgcactgtccatagcaacataaatcgggatatctccaatgatcttgattccattttcatttgcatatgcctttaatttcatccattgctcgtggaatttaaactgcatgtactgctggaattcaatatcataatacagttcctctctgtaataatccattgcccatttccaacggagacggatatcttctgcccattttgtccactctacattgtcaaatcgtccttttacagccatgaacagtgcataatctgacagccaccagctattctcattcacgaatttctgatactccggattctcactgatcttacttctctcataagctttgcgaagtaatggataacgtccattataaatcttctcgtaatcaatggaaccctttgcttttccccagtttactttctcacattctgcacgtgtcagaacaccttcctcgatcagttcatcaagactgataaagtacggatttcctgcaaatgtagaaaaggactgatatggagaatctccataactggtcggtccaagcgggagaatctgccaataattctgtcctgctcctttgagccaatctacaaattcatacgcactttttgaaaaacaaccaattccgtactctgacggcaaactactgatcggcattaaaatacctgctgctctttcgctcattttatcttcctcctcttaatcttctacctcaatcattactccataatgatcggatactaccgggtaattcttaccattatataccactttcgatgactttacttttttctgcgtattacagaaaatgtaatccagacgtttggcatctttcactgctccaccgccttctccatcgtacttccgattgtcattacgatagaaagatccgctcctgccatctgtaccagcttaccgatactgatcatcaatcctgctgccggcataactgcgataaccgtcatcagaactttacctaatttctgaagcaaatcaaaattgagattgaatttcttctttcctttcgtttccacctttaaatttctcttttagatctccctgcatgccatcgcatcatgtggcacgttttttgttgcattgttctgcgcaaccgtttgcattaattatatgtacgttttgcacgaaatgcaattctatttataaatctattttctatttctgccttttgcacaatttatatgctctgtttttgtacattctcacaacagtttctatgcaaaaaactatgcaacagatttgacatcattgcgttctttcactaaaatagtaggtgacgaattttttgtaaaaatgtaactattcagagccaagctaaatttcaaaaaacaggtataaaatgcttgcatttttaagactgtttttgaaattttatttggcggatacgccacaccgacgaaatgcgtagcattttggatgttggctctgaacagttacgtgaaaataaaggaaaataggtgtcagactcctgacatcctcatttcctcacaggagggaaaatatggcagtaacaattaaagatgtggccgctttggcaggtgtatcaccttccactgtctccagaacttgtaagaataacccatccatcagcacagaaacaaaagaaaaagttcgtaaagcgatgatcgaacttggttacgaagtaaactttcaggccagcaatcttgcttctcagtattcccgcacgatcgggattatccttccggcatctgcccgtgaagtatatgagaatgctttctatcttgaagcaattcgcggcatcagccactactgtaaccagagacaatacatgtctactgttgtgacaggtcaagatgaagatgagatcttaaaagcgattcagtctatgtcacgaagtggaaaagtagatgggttcatcgttctttattctcgaaaggacgatccgattattgattatctcttcagcgaagggcttctttatatcttgattggaaaagcaacacagtacacgaatcagacattatatattgacaatgataatcttcttgccggagaggacgcgaccgaatatctctatcagctcggtcatcgcaagattgcttatctgggttccgacagttcactgacttttgccgcagacagaaaaaccggttaccagatggcattgactaaacacggaatccctttccgtccagaatactgcgcggaagttctgaatgtatcaggagataacacagaagcaatttcttctctgttactgcaggatgaaccgccaactgcaatcgttgtaagtgatgatattcttgctgtttctcttgaaagagtttgtcttcagaatcatgtttcaatccctgatgatttgtcgatcatctctttcaacaactctctgtttgcaagatcgacatctccacagcttacttcaattgatattaattccaagcagctgggtatcgaggcggcatcacagatgatcaatcatattgagaatccgaatcttgttgcaacaaagattatcgtgccgcatcagctgattgaacgcgacagctgttgtaaaataaatggataaaaggacggagagttctgacattttcaatcagaactctccgtcctttttatcattttttcttctgatatcaaccaagcgcttacaaacttagatgttgcaacaatctgcatacctcttgtgcaaccgcatcatctctattagattcgataactttctctgcgtttttctttaaactttctacggcatttttcactgctctggaatgtgggaatttctcaaacattgaaatgtcattatttccatccccaaataccaatacctcttctttactccacccgtaatactctgcaatctgttccagcatagctcccttattcgcctgtcggtctgtaatttctatattccaagttgcagatgaagtaactgtgatatcttgtctcttcttcagaaattcttttatgtttttcaacttattctgctcttctgggaaaataaatatcttttgaattttaatctgcgcatcaaaaattttttccactgcgggcattgggcgagccgtatcgcaaaactcacagtctgtcgaaaaatctcctactgaagtattaatttcaaaatcaagcttcttttccatgagcatctgtataatttcctgcgcacaggattcttctattgatttttggaaaatcaaagtcccatcactctttcggaattcagctccatttagcagaagatattccggtgaaactcccgctgttctcataagctcagatgccgttttcagcgaacggcctgttgccgcaacccacagaattcctgcctgctgtgcattccttatacactccgctgttttctctgataacatgccttcctcatttagaagtgtcccatccagatcacttgcaattaatctgatcaccgtaattctcctttacctttgaaaaatgaaatgcaaatgtatggaaatctcgttttattaatggtagcgatactccgatctccatcagttcatctccaccgaaaatctgcccggtactttcatctttgtaatcccattccggattcagaccacagagatgaattcttccatgagaatatctcggatcaaacagtttctgcatgataataacttcgcattcttctcccgtcgcagaaacaaccgaccatgcaatataattttcattcggaacttcaagataactaagcactccattttgcagccagcctctctgttctttatattcctgaatctgatcagcaatttcttttctttcttcttcggaacattttgtaagatcaagttcatatcccagattaaataatcttgctacctgatatcttgcatccagagaagtacttcttccggtctgatgattcggaacaatacttacgtgagcacccattgttatctgcggatataaaaggctataccctctttggatcgtcgcacggtcaaatgcatccgtattgtcacttgtccaattctgcggcacataatacaacattcccggatcaaatcgcgcaccaccactggaacatccttcaatcagaacatccggatatttttctgtaatgcgttccaaaatatcatataatccaagcacataccgatgactgatctcttctttttgctgtactcccagacatgcagaattcacatctgtcagcggtcggttcatatcccactttatgtaattgatttttccatctttcaaataaaaatctaatgttttaaataaatattcacggacatcttctcttgaaaggtccagcagatattcatgtcttccttttaccgattgataccccggaatgtgaagcgcccagcccggatgatgacgtaacaactcactatcctcgctgactgcctccggttcaaaccaaagtccaaactgtaaaccttttttatgaatcacatctgcaactgctgcaattccacccggaagtttctgttcattgcatatccagtctcccattgaagatctgctgtcatttcctttacggaaccaaccgtcatccaatacaaataattcaattcccgcagctttagccaggtctgcctgttcatcaatcttctccattgttacatcatagtacatagattcccaggagtttaaaagaaccggtcgtgtcttttcctcaaatcgtttaggaattagatgctgttggtacagccaatgaaaattgtggcgcattccattcagccccgtattgctataattcaataccgcttccggagaagcaaatgtatctcctggtttcaattcccatttaaagctgtccggatgaattccaatctgtgcccgtacatttccaaactgatccttttccacctgtgcgaggaaatttccgctataaacaagatgcgctgcccagacatctccgctgcattcattcgtctccggttttaacgctgccaaaaatggctgatgctgaggactgctgcttcccctgatactctccgttttctgcaccccataatgaatcgggaaacgctgcatatttgcctctttagcgtgtgtcccatataatgtcataagttcatactcttctgccggaagttccagagacatactctgaatattctgaagaaaaacggtctgcttcccataattttctactttttgatgtcgtaaaacaattccgtgattttcaaaaattgtataataaagaaaaagtcggatccctgctctgtcatcttcacagatcacttccagtgtctccgactcattttcattaacacgaatctgcggcataccttgtaatttaggcttaccggatactacactccagcttttaaacaccggttcgcaaaatgttattccatcttcttgtgtgattgcaaaagccggaatacgaaaatctccatgtcctccgaccggatattcaaacggaaaatcatcaaaggatacattttcgacagagctgtcatgttccgtattataccctctcttaaaatacaggggatttccggtcccccggtaatttcggatctttcgtccgaaataccgatgaaccagatattttccatccacaatttccatcacataacttattgtatcattacttaattgcacgatctgccctttgttatgaaatagaatactcatacttactgctccattttcttattaaaaccaaacatccatgtcagtccgaatgccacaccgaaagcaactacatttaccagaatatagagtggcagctgctcgttaagatacagcaatgttcctgggatacctgtaattgacattcctgttgctctcagatggaagattgatgccagaaatcctccaacaccaccaccgatcattgacattacaaacggtttcataaattttaagttgactccaaataccgccggctctgtaattccaagtaatgcagacagacatgccggatatgccacctgctttgtcttattagacgctgctttgattgcaactgcaagaactgctcctgcctgagcaacatttccgcaagttccgattggattcagataattccatccatcttgcgccaacatactgatctctaagaaattcagaatatgatgaataccaaaaataccaagaagctgtccgaaacatccatataaaaatccgcctattcccattggaaggaaaagaagatgttctactgcaaacagaactcctgactctactgtatgtaagattggtccaagtacgaacaatgccagaacacatccaaccaacaatgttaagaatggtatcacaatcagatcgattgcatccggaactttctttcgcagccatttttcaaacttggaagcgacaattcctgtcacaaatgccggtaatactgatccctgatatcctgttacttttaaaaatccaaagaaaatcaacggctgtgcctctcctgatccaactgcataagcgcttggcaggctgctgtttacaagcatcaatcctaatacaattccaattaccggacttccgccaaaattccggaaggttgaccagcacactaaagccggaaggaatgcaaatgccgtgtctgtcaatacctgtgtaaatgtaagaagattctgcggaatactatcagctgtcagaccaaatactgcaagtactgcctcctgagtcagaagccctctaagtcccataaacaaaccagtagctacaagcaccgggataattggcacaaatacatcagaaaacattctgattgctctctggaatttatttccataaactaccttttctttttcctctgacttttcttcgtcgcctgttcctgtaacttttacaacttcatcatagattcggttaaccagacctgttccaaggataatctgatactgtccggaattaaaaaagcttccttttaccttctccagattttcaatctcttttacctgaatcttttctttatcagctactacaatacgaagtcttgtcgcacaatgtcttaccgacacaacattttccgtgccgccaaccagttcaagaatcttttttgctaattctttatcactcatttttctcctctccttctcccattaaatcatacatttccacgactgtttctttcatgagtccgcttatttttacttttccattttcttcttctgtgaacattctcatagaaaacactttgcttccctgattcacaaaaatttccatactggaaatatcagaccaacattctatcgtttccaacgaatcaatcttacagtttctctcatcataatcttttgtaacccaattttttctctttacagaaattattttttctacttttttgtattctagaataacttctctgttctgaaattctatttcaaaagaagtttcattctgaagattagatagttttgcacagtatactctgttcttaagaattatttctccactttgtctttcctgctcagaaatcttatgtatgcacaaacttttttccaattctcttaccggaagctgacacagttctccgtttcgataagaaagctctcttggtaatgtcatacaatggatactggattctcctgcaccaaacagcttctcttcttcctcttccattcttgacatccacgcaaacagaatttttcttccatccggtgatgtaaatgtctgcggcgcataaaaatcaaatccctgatccatctttttacgcccttcatccagattctgcatattgctatcttctatttttcctgaaactatgtcattaaaatcaaactctttataagccgaaaaactacaaagtgaactatcactttcattatctctgtgctgcggacaataaagcaaaattccttgtccatctacctgaaaataatccggacattcaaccatttcatactccttggattttgcaagcactaattcgaatttccaattttccgcatccttggagctgcatagtgcgacagaacctcttccatttttcatctgtgctccgatcaccatataatagtcatcgccgtcctgccatactttcggatctctgaagtgctcggtaaactccgtaggtgttgataccacaatgccttttttctgaaatgtcttgccatcctcagtaactgcaaggcactggctgctttttctcacaccgccgctcttattatttcctgtataaaataagcgaagctgaccatcctttatcaatgcactacctgagtaaactccattttgctcataaaactggtccggcaaaagagcacttccttcccaattccaatgaagtaaatctttcgatgtaaaatgtccccattccttgtaagaatgattcttttcaaatcgattccactgaaagaacacatgatacatatccttgtaaaaaactaacccattaggatcatttagcagacctctgtccggttccagatgatatttctgccgttttatcatttctaaatgacctcccgtccttactttctggcgcctgactatattaaactatatttttctattttggaacatagcattttcagaagaatatatggaaaaaactaactttttgtattatgatagacttatgattgaatataaagaaaccaaacattctctggtatataaagccaatagtgatctttctctgtacagtgccggttatgaagaatgtacacctggctacagttatggtccgactttgagatcatatcagctaattcattttgtactcaacggggagggagtatttcgtattaatgagcatgtgtttcacctaaaagcaggagatgcatttctcattccggcaggtaagatcacttattatgaagcctcaaaaacaaacccttggtcttatgcatggatcagctttatcggcatcagctcggaaagctatctctatcagattatgacttcaacagaagatatttatgtgatccatggtctggatacccgaaaatattacgattctatttccaggatcatgcaattagacgcctcattgaccagtcattattttgaaggaaatagtatcctgcttcatattatttccatgcttttttcagatgttgattttcatgaagcagacacaaataaactgtcaattatcgatgaaattaaattttactttgatatcaattatgctgagaatttgaagttaaaagatgtagctgactatttcggcatccatcagaattaccttacacgggctttccatgaaaagtttggaatctcacccaaaaaatatctacttcaactgaaattcaaaaaagctgcaaggttacttgcaactacacaacttcctgtttcgattatttccaattcacttggatttgaagaccagctggcattttcacgtacatttaaaaagttttataatgtttcgccaacagattaccggagccatttaaaaccgtaacacttcttacgttttttcatccattttctgttactcaccacctgaagaagtgggagtcttctcgactgagataaacaatccgcagaatacaaagttgcgaactatactgatacttacaaaaaggacagagatttctgacatttttcaatcagaactctctgtcctttttcatcattttgatatttataagaccttatatttttcaaatatttccaagtactcctgctcaacatccttgaatgctctcaccgtataatcaggtaccatacacgtctccggcttgtctccttctgagtcttcacccagtaaatatttcatatcataccacaataccgcatcatcaatctctttgatcagcttctcttcctgctcatcaagcggtgaacccaggaacttggtatataaaacatcaagcaaatgattctcctgctctttatatactgtcataaattgcttcaacggacgcggcacatctgacatataacactcacttgcatcatgcaaaagtgcaccctcgatcacacgattgctgtatcctctggctgcagcttctttcgcgcacagaatgcaatgttctcccaccgaccagaacgtactgacctgaccgtttccccggcagatcatcggaagtgcatgggcgatatctacaatgttgattagttccggatctggattgatcggatcaaaatgatttcctgtgtatgttgtgatgtaactcataataaactcctactctctttaatataattccataaactctcatctaaatctatctcttcttttgctttgagacctcgtctcatttataacttcttggatatccatatacggcacacttgtaaaaatatctctaagttcatctgccatatccaatgccatcgcaatcttcgtcaatgaaagtaatgaaatcattcctgtcatctcaaaccttttaatcgaaccataactcacaccactcatagatgctaatttttcctgtgaaattgaacgtctctttctaatattacgcactctttgcgcaagcttttgatcaagttcttctgctgtttcccatactaactgttgcattcatccacctcactttatggataatattttatctatttttaactattttatgcatttttagataatattttatctatttgaatcatatcacttttatcttttaatatcaaccaggcacttgcaaaataactctaaaacctctaaaattattgtatctgccaaaacatttaattaagggagaatatttatgagtatatacgcaatttacttcagtccaaccggtggaactgaaaaaatagttacatttatagctgaacaatttggcgaatatcagagcattgatttatgcgaaaagacttctgatctaacaaatgatttttccgaagaagatctctgtatcatcggagttccttccttcggtggacgtgttcctgccattgcattagagagaatcaaagccctgaacggaaataatgcaactgcgattctaatcaccgtttacggaaaccgtgcttatgaagatacattgatcgaacttgaagatactctgattgaaaagaacttcacctgccaggcagctattgcggctatcgcagaacattccatcatgcatcagtttgcaactggaagacctgatcagaatgatcttacagaactcgcttcctttgcacagaagataaaagagaaaacaaacaacactgtaaaaactgattttccaccagtacatgttccgggtgacagaccttaccgcgaatacggtacgattccgcttatccctggtgcttcacatacctgtggttcctgtggattgtgcgcagcgaaatgcccgtcaggagcaattccatctgacaatcctacgcagactgataaggacaaatgtatttcctgtatgcgctgtatcagcgtctgtccaacgcattcccgcaagctgaatccactaatgctggctgctgcttcccagaagttaaaaaaagcttgttccggacgaaaagaaaatgaactgtttttataaataagactataaaaacacccgctattttcatccttctcaagataaaataacgggtgtttataagtgtttgcactatacaactacttctaccagtatcttgtcaccaaattggattttcctattcgttattcttcatcctccagcttcacgcacggcagattccatctgtaatgcgcagctccgatacgaatcacaagcacaaccactgttccgatcacaagtgccggaatctgacccaggtttctgtacgccagcacgcaacagattgcccccgcaatcgatgcacaagcatacacatgctttacaaaaatgtatggtggaacccctgccatcacatctcgtagaagtcctcctccaactcctgtcagtactccaaggaaacttaagaaaaacatattatcatgatatcctgctgtccatcctgtggatactccgactgctgtaaaaatcccaagtccgaccgaatccatcaggaacattagtcctgcatagagtgcttggtatttgctatgcaacagtctcttattaatagaaagtaagagaaatggcgctaatgcagaaatcactgccacttctacataaatcggcttcacaaatgcgctcggtgtcttccccaaaatcacatcacgcatcattccgcctcctactgcagtcaccacaccaagcaccaacacaccgaaaatatccatctttcgccggataccaaccattgcccccgaaattgaaaatgcgatcgttccgatcaactcgatgatcaaaacgatcaatgtctgtaaatccatattgtttcttccccatttctataccgatatttcgactaatatcagtagtttctgtttgaaattttatcataaaggatttgcattttcaataatgttacacatgttttgattcctttttaatttcgtcatttttcttctgaagcatccttccgagacactcattcccgccattttcacaacaattccctgaatattcccgttatacaaccttaattttttcatttatcacacctttttcaaccttcaaaaccttaatttttcaccctacaattctccctgcttttcccttccccttgacaccgggtgctatagtgtaactgtagcaaagaaaaagaacacttaacaaaacctacttattattttgacaagttgaaggctgctaagcgaattcagtaatttggaggaaaagataaatgaatactttaaaagctgaaaaaagagacatgtcaatcaaagcaaaaaaattaagacgcgaaggatttgtaacaggaaacctgtttggtcgtgaactggaagattctattccactgaaatttgataaaggtgaaatagaaaaacttctgaaagtcgaaaacaaaggtggccaggttatgctggaagttgccggtgagacttatgatgcactgatcaaggaagttgattacaatcctttgaaggggtatatagatgaaatagatttccaggcactggtaagcaatgagaaggttcactctgtagcagagattcaccttgtaaacctcgagaaactgtcttcaggagtaccacagcagatgcttcaggagatttccttcaaggctcttcctgccgcattggtagagaaagtcgaagttgatgttggacctctgaaaatcggggacacaattcgtgttgctgatcttccaattgccaaagacaaagatgttgatcttatgacagatcttgatgcaacagtagttactatcacagaagtacacgtaaaagcttctgatcttacttcagatgaagaggaagaagaagccgcagaataattttaacttaacaaacgacaggcgcagagcttcataattgattccctgcgcctgttttttgctttcacttttacatcgctatctttccttgtttcttccacttccgtgtcacatagatataatacgggatcagtggaatcaatgcagagatccatgctgccggatctgacagacacactcctgcaaagcttgtttttcctgccacaagaactacaattgcagatctcgccgcaagttcaaacactcctccgagcatcggcacaagtccatatccaagtccttgcaaggtattcctatataggaagatacttcccaggaatggataacaccagaatactgtatggaaatacagcactgatacttcaataactttcgtctctgatgggctgataaaaaggtaggtcagatatttactaaagaaaaataccagtatcatcgcaattacgctgtaagccagaatcataatctgtgtacagcgcacaccttgtcgtacacggtctacttttccagctccccagttctgtcccacataagttgcaatcgttgcaccgaaagcaacgaatactgtgcagattacattctgaatctttgctgccgcagagaaacctgccatataatcttccccgtaaacatttacagcaccctgtacaataattgttccgatcgctgtaatagaaaactgtaatgccatcggaactccaagagccatcaattttccgcaagctggaagagaaaatctgaaattctcttttttaagatgcagaatagggaacttcttcacgatatatataaagcagagtactgctgagattccctgtgcgataactgtcgcataggcacatccttctacacccatgccgccataaataatgaacgccacatcaagtcctacattgattactgctgaaatgatcaaaaaatacaatggggatttcgaatcacccagtgcacgcagaaatgcagccagcgcattatacgctgccgttacaatcagacccgcataaataattcccatatatgcctttacgtccggcataatgctatccttataattcatcaaacgtaagattggctcatttgcaattccaagaccaatcgtcataagcacagcccagccagcagaaaggtaaatagacatcgccacataatgccgcatcctctcatattctttcgcgccaaaccactgtgacaccaaaatagcaaatccactactcagaccgttcagccagcctgtcacaaagaacatcaaggatcccgtacttccaattgcagccagtgctcttacaccaagaaactgtcctgctatgattgaatcagcaatgttgtaaaactgctgaaatatatttcccaaaaacattggtatcataaactgcatgatcaggcgggccggacttccggtcgtcatgtcatgaatcgttgtgtttttcattgttgcattgtcactcatactgtcattatttcctccaattcattacatccatcaccgatttttgtcggttattcattcttttctgcaccttcaagtctcgcaccttccatcatggccagaacaaactctttcatctcctgtgcatcccagatctccggaaccggataaaccggattcgcctctttctgtgcccattttacaatctggttcacgtcttcttcccgaatcatatccggatatttcggaattccaagtttctcttttaactcttccatccactggagaaatgtttcggcacgaacttcggctgagatcataccgtccggtgtatctacttccatcgcacagatatcacacaaatccgcaagcttatcatacacagaagatccataggcacgcatcacatgcggaagcagaattgccatcacaagcccgtgaggcactccatagagcccgctgagcgcatggccaattgcatgaacataacccacactccctcttgtaaatgcgcgtcccgcatgaaatgcagcctcctgcatatcctgtctcgcttgcagatttgtcccgtcttcatatgctgtcagaagactttcatgaatcaatcgtactgccttactacacatcagacgctcaaaatcactgttatatgtatcattcgtgtatgcttccactgcatgacacagcgcatccattcctgtctgtgctgttacctgtggtggcagtcctactgtaaggcgcggatcaagtactgcaaagcgtggcatcaattgcaaatcattgattgatgctttatgatgtgtctgaacctcggtgatcaccgctgcaatcgttgcctcagacccgctgcctgaagttgtaggcacggcaaagattacaggaatcggacgtagcacacggaaaagtccctgtaagttccgaactgctttcttcggtctcgcaactctggctccgatcccttttgcacaatccatcacacttccgccaccaaatgcgatcatgcagtcacacttttctccaagaaatattcctactccattttcaacttcttcatccgtaggattctgagaaatgccatcaaagataacatatttcaacttcttctctttcatctcttccagcagttcattaagaagccccctcgcacggatcttcggtcctgttacaattaatactttatgaaatcctctatctcgaaccgcctctggcagcttcttcactgctcctgatccactgagcattttcggtgaacgccacggaagtgcagccatcaaaagcttcgcccccgcctgatatactctgcaatattttttcattaaaactgatttcacatttgctttcatctcacacctgccattttcatgaatactgtgatttgtattttgccacactcctgctttgaaatcaatcaattctttctatattaaaggaatttttttaatgttccttttcacttgtatataataatgcctaaaaatctgtctgattttccttattttctttttttgtgaaaaatgacaaatgattttcgataaatttttccattatttttgctatttttttattttttctatgtaaaatcctagcaatatcgcacaaaaaagagtatactaaagaagtagtattatgaaagagagggctttttatgaaacacgataatatgttggctatgatcttagccggaggtcgaggaacccgcctccatgatttgacaaaaaaagtggctaaaccagccgtttcatatggcggaaaataccgcattattgatttcccacttagtaactgcgcaaacagcggaattgacattgtaggtgttctgacacagtacgaatccgtacttctgaacagctatgcagcagcaggaagaagatggggacttgatgcgaaggacagtggagtttatgtgctcccaccacgtgagaaagctgatgcgaaccttgatgtatacagaggaacagctgacgctatttcccagaatattgactttatagatacatactccccagactatctgctgatcctctctggagaccacatttataagatgaattacgacaagatgctcgaatatcataaacagaacaacgcagatgcaacgattgccgttatcgaagttcctatgaaggaagcaagccgttttggtattatgaatacagatgagacaggacatatcgttgaatttgaagagaagcctgagcatccaaagagcaacctcgcttccatgggtatttatatctttaactggaaacttcttcgtaagatgcttctcgcagatatgaagaatgcagattccagccatgactttggtaaagatatcattcctactatgcttaatgacggaaagagtctgtatgcatacaagttcaaaggatattggaaagatgttggaacaattgattcactctgggaagctaatatggaccttcttgataagaacaataagcttgatctgaatgacccaaattggaagatctatacagaagatgcaactgcacttccacagtatatcggagctgatgcagttgtagaaagagccttcattacacagggatgtgtcgttgatggtacagttaagaattctgttctgttcactggtgcgaaagttgctgccggtgcaaaagtcattgatagtgtcctcatgccgggtgctgaggttgcagaaggtgccgttgttacacgtgcccttgttgccgatggcattaagattggaaagaacgctgttgtcggagacgcagccagcgagaatatcgagctcgttgcaaaacgagtaaagggggacgaataaaatgagtaaagcttttggaattatcaactttgcaggaaacaacatacaggtaaatgacatgcaggcataccgtccgatcggtgccttctccttcctcggaagatatcgtgtgatcgactttccgatttctaacatgagtaacagtggaattgatgtaatgcaggtttatgttcgcagaaaaccccgttctctcgtagaacacatcggaacaggacgtcattacaatatcaactccaaacgcggtaaactgattactctcttccaggagagcaacattgacaacggtatttacaacacagatatcgctgcttacatggaaaaccttgactgcttcgatgagatcaactctgagtatgttgtgatcgcgcctagctacatggtttacacagctgattacagtgcatttctcaagacacatattgaatcaggtgcagacatcactctgatgtatcactctgttgacaatgcgaaggatcatttcccgaactgtcagacactgaacatcaacaaacagaaaggtgttctctccatggagccaaaccttggaaatgctaagaacagaaacatcttcatggatacttatgtaatgaagaaagatctgttccttgacctggttcagaaggcacacaaactttcctccatgtacacactggctgatatcgtgaatgagtcttgtgaggaacttgatgttcgcgcatatccacatcgtggatactttgcaacaatctcagacttcaatagttactatgaagcaaaccttgaactgatcgacctgaaaaaagcaacagatctgttccatgataactggccaatttatacacgtacaaatgactcctgcccgacacagtattttgaaggcagcaaggtaacatcctccgtaatttctaacggatgcctgattgaaggtgctgttgagaattctgttatcggacgtggctgtacaatcaaagaaggggcagttgttaagaattgtgtcatcggtgcagacgtggttatcggaaaaggtgttcatgctgaaaaccttgtgatcgacaaacatgcacgcctgattcgtggtaagcgtattatcgcatcccctgataaaccgggatacatcaaacgtggtgacagactgtaagcttaaaatcgttttttacagaatcttataggaaaataatttttccataaatatgtgtcgttaatacatatacataaaaaaccggaaagtaaaagataaatttaaattcttttactttccggtttttcagtttatactcaaatttgatttacatttttatttgcgtcatcttttacttacgattctttttgtaaataattgcaagtcctttcaggagcagatcatcgtccaagataatctctcttctacaatgaggaacaatcttcttcgccagtccgcctgtcgcgatcacagttgcctctcccccaagctgttcctgcagacgatcaataattccatccattgcggcagcgctactgtagatcagaccactcttcatacactctgtagtattctttccaatcatatgctccggtgcttcaatactgattccgccaagctgagatgcatgagctgtcagagaatccagagaaactccgattccaggataaatcatgcctccgatataattcttatttttatcaatcacgcagactgtatttgctgtcccaagatcaaagattagaagtggagccggatactcaacaattgctgcaacagaatcgaccaccagatcacttcccaactgtgctgggttatcgattcgaatgttcaatcctgtcttaattccggctcccacaacaagaacattcttcttcaggatcttctctaccgccagcttcacgatggttgtaatctgcggcacgacagaagaaatgattccgccttcgatttcatctctatgaatatgataaatatcaagtacattcttaatatcgattgcatactctaactctgtcttcgtacgaacagttgacaaacgttctacaaaaagagttttatctccatcaatacagcccaatacaatatttgtatttccaatgtctattgtcagtatcatcttttaaacttcccctctctgtgccagaatctgatcaaggattcgatctgctgtttcctcttttgtcagcttgccgagctctttttcaaaatcttctgtaatcactgtgaccacattcgtattcccgccaaacccggcgccttccattttcaaactgtttgctataatcatgtccaggttctttttcttcagcttctttctggaattctcgagcatattttctgtttccatagaaaatccacagagaaattgatcttttgttttatgcgctccaagatacgcaagaatatcatctgtgcgttccatttcaagtgccagatcgtcatcctttttcttcaccttttcatcactgacatagcgtggtctataatccgcaactgctgctgccttaataataatatcctgttcttcggcccgtcctgtcacttcttcaaacatttctctcgccgttgtgattggaacaacatttacaaaatgtggcttctcaatagaggtcggtcctgtgacaagtgtaacatccgctccacgctgcatacatacctttgcaatcgcataccccatctttccggtagaatgattcgtaatatagcgtacaggatcaacggactcctgtgtaggacctgctgtaaccagaacatgcagtcctttcatatccttttctcttgcgatttcccgcaaaatatattcaagcaaaagctccggttccggcatttttcctgctcctgtatctccacaggcaagataaccaaccgcagggctgatcacttcataattataatgctccagtaccttcaggttatcctgaacgattggattctcaaacatattcgtattcattgcaggagcaacgatcttcttacatttgcacgccatgattgttgttgtcagcatgtcatccgcaatgccatgagcaatcttcccgattacattcgcacttgccggtgccaacataactacgtccgctttcttcgctaatgatacgtgttctacactatattgaaaattccggtcaaatgtatctacaagacacttatttcccgtcagtgtctcaaatgtgatcggattaataaaatttgtcgcattttctgtcataagcacatgcacatctgcatgcaatttcttcagcgcacttgcaagtgacgcaattttatatgctgcaatacttcctgtcactccaagaagtacagtttttccctttaacatgagtacatttttcctttctgttaaactcttttttagtttagcacaacaaatattcttagaaaagtcctttaccgttatgtttttcacaaaataccgtataattttgtattttatccacattctatataaagaaacccacattcttttcttataactgatgcacgtattccatctttgatattatttcgtaacaaataacgcaccataaaaaggaggatttcatcatggatgaacaaacacgaaaactatatgaagaatgcaacacaggatgtcagatggcaatcgaaagtatgcagcaaatcaaagatttcacccaagatacaaccttattccaattaattgaaaaatacattgatcgtcattctcgattaggcggtaatgcaaaagaccacctgattgattcgggaaatgaagttaaagctccgggaatgatggcttccgcattttcctggttcagcacagaacttaaactgaatctgaatgatgataactccaaaattgcaaaacttctgattgatggatgcagcatgggaattaaaacactcggagaacgtgccaatacattgaacagggctgacaaatctgccgatgcgctggcaagaaaaattatcaaaacagaagaagaaatgatacgagaattagaatcatttttataaaatttgctttctcttatctgtaatgttagtatagtgatattaagttattgacattacagataaggagcattctatgctgaaatcatatattgcatttgacctggagacaaccgggctaagtcctcaggaacatgaaattatagagattggtgccctcaaagtccgggaaggaaaggttgttgaccgttttatggaattcgtccatccagacaaaccgatcacaccgatgatcaccaacatcacacatatcacaaatgatatggttgcaggagcaagatcctgcccggaagtcatccacgattttctctccttttgtgaagatgacgtgctgatcggacacaacgtcatgtttgactatagctttgtaaaatgcagtgcagtcagagaaggtcttgcatttgaaaaaatggggatcgatactttaaaaattgcccgcaaagtacataaagactttgagtctaaaagtctcggtgcgttatgcgactattatcatattgagaatcctgctgctcaccgtgcatactatgatgcactcgcaaccgcaaagctttatcagacactggcacactattttgagtcacagaatccgaaagtgttccagcctcttcaacttcaatataaaattaaaaaagtgcagcctgccacaccaaagcagattgcactcttagaacgtctgacggaacagaaagaactgatacctgactgggatgcagctacgctgacaagaagcgaagcctcccgaatcattgacagacttttgaaatcttaatcttcctgaagtctctgtaccattgcccagattgcctttgctgaattgaagttcaccggcatcatctcagaggcttcaatgctgatatcaaatgcatcctccagctctgatacaagtgtgatgatcgcgaaagaatcaagaagctgatcatcgatcagagctgtctcgttctcatagtcaatactatcatcaatctcatttaaaatcgctaataattcttccattttttcttcctcttttcctatcattttgaatctgtaactgttctaccatgttcaattcataagtttcctgctgtactcttgcctggatccatccttcttcctcgctgtaaagcacaacccccggaagttcatggctcaagaacaatgccattccttccattgctgaatacgcaccggttctctcgaatacaaggatgacgcctttttccaaacccttcagggtgatttcattgcagagaacatcattcagtgtacataaggatccacaaactttccaggtcttttcttctgtattcttattttcggaaacttccgcaaccttcactgaaacttcctttggaagtaccttcacatacggttcatacattcccttgatttgcccgtcataattgagctgatgacagcccccgtcaacaatgcaataatgaatgccgtcactcgtcttggtatcttccactttggtcaaatagtagccacacatcgccgccagcgcgcgtcccagctctactgttacatgtcccttccactgcatgcccttcacagcgtcctgaagtccctttaatccagcttcttcaaaggtctctgccgttttatcgcggaaatacggaactgccgttccagagccgtattccagacacctcacatcgatctgctcttctgccgctttctttaaaaattcatccagatatgccagttccttctgatggcgcttcagattcttcttttgtgttcctgagaaatagtgaattccttctgcctcgattctcggaagttcctttgcctttttcagaatttctaatacagtgtcttcgtccattccaaactgatttccactcgtaagccgcgggtataaccggagcacaccatcctccggatgttcctcgctccattctgcaaaatattggaaatgcagtggagattccactgtatatgcacatttatttccgcaatatgaaagtatctcccggatatcatcccgttttttcataacacctgaaataaataatttttccaatggtacctgcagtctccggcagatccggaattctcccatggagcagacttcgatgcggtctgcccactgagccatatatcctgtcagaaatggattcgccttcattgcataacaaaggctgatccccggaccaaagcctgcacgaatacgctctgtctgttcttttaagatatccagatcaaacacataaaggggcgttccatactttctaaacgcctcttgaagcagttcttctctcataacatttatcctttccccttattctttttcctgtgattaattttaagacatcacattctattttttccataattcttaaaataattacggtctgtcttgccattcttgttcaacggcatctcatctacctgaatcaattttgtcggaaccatatagaccggaagtttttccttcatctgttttctgacatctgaggctgctttctctccaagataaaatcccataatacgatttttctccatatcaaagacacagcagctcttctccactccatcaagtgctgtcatagaacgctcaatttcctccagctcaatccggtgtcccatatgtttgatctggaaatcttttcttcctgcaaatacgatatttccttcttcgtcataacttccaagatctccggttcgatacattctctgttctgttccatctacaggatacagcacaaacttctccgctgtctgctcaggttctttataatagccattcgccagagattctcctgccgagcagatttccccctgtacaccaggttctgtcacctgtttaccttcctcgtctacaaggattactcttcttcccggaaatgccttaccagccggtattttctcactgtcctcatactgtcgctcaatcgggaaataggtacagttacaagtaatctcagttggtccatataaatttacaaattttgcatccggcagcttttcctgccagatacgcagctgttttggcggcattgcttctccgctgaacataactcttttcactgattccggcactctgtaatttaatcctttcagcgcagacacaagtgttaatgccgaaacagcccaggtcagattggtcactttcttatcgcaaagataatccagaagtctcggcggtgtcgagaagtattctttcggtatcaaaacaagctgtgcccctgtcatgatgctggaataaatatctttcacagacacgtcaaaatcaaatggtgcctgatttccaatcacatcttctgatgtaatctcaaagatttctgtaaaatgacggacaaaccggctaacagcaccatgacttactacaatcgccttcggagttcctgtagacccagaagtgaaaattccatacaaagcatctgtctctttccattgtccctggatctgttcaagtttactgcgctgttcttctgacaaatccgttcctgttgtcggtagaagtgtctccggtccgatcactttctcttcgagtcctactccgactactgccagctgctcttttcccttctcatcagaaatgatcacttccggctccagcttctccataatctttcgcagacgttccgccgggttcatcggattcaccggaacataaaaacatcctgcataaacgattccaagcatcactgccagtgtttctgaacttttctctaaaagaaccggaatcggatttcccggttgaacttttttacttaattctgcacctatcacctgagctttcttcacaagtcctttccaagtcatctcctgatttacatccgaaacagcaaccctgtcttcatacttttccgctgtctgctccaggctccacaaaatattcaactcttcttttgctatcattttcccacacccgtttcttttgccacttctatttttccttgtattcttgcaaggttctgcttatactgttcggccagctgattccatgcttcatacgtcggatcatttctatgatcttccagttcataattctcttctaaataatttccaagatacgaagtcaccttctctgccccataaacattcagatgatcgcccttatcctgtgtatcttctgtccagttcagccctaattcttccaccttcttattcagatccagatatgtgattccttttccatccgcatatttctgtatctctgcatgccgtttatgattccagttctttggtgatggcatacttacaagcaataactgcgcattattcttttcacacagttcttcaattttctccagataaacctttacatactcaggcattgtttcacattttttctttttcttcatataatccggttttccttcatatggatcaacctcatccctgatcacaaaccccttgtaattcgtatgcatttccggctcatctactactgtcttccacagattatgataacggaaaaccggcagataatactgtcctgcctgcgttaatatctcctgtgtactttttactgctccaatatcacggaacaatgtatttgtctcaagtatcacaatctttggagactgtttcttaaatgcatgtttcagcatgtaataagtctctggaattctctgtgctccctgtccacagtcataagttgtaatccctttatcgtcccacaatcgcattgttgatacggaattatagctttcgctgtcaccggccaccagcagatccaatgtatcttccggctcaactgtaagagccgcaaatgggcggtttcttccggtcacttctccattcagctgatgcaccacataatattccatcccgacagaacttgtcaccaaaaatactgctagtattacaataaagagaattcctctttttatcttactcattcttatcacctcagaaaccagcatagatcagatcctgaatctgatatccatccccatacgctgcgaagatcaaaatccctataactaaggcataatacaatccccagcgcaccggtacagccagttctcccattttcttctgtacagagattccgcgctctttcatagaacccacaattccgacgatcaggcatcccactatcaccgccagataatccgcctgctcgagcccgagtgtatacagtgtcccatctgttaattgtcctgtatcaaaattctttatcatactacagaacatataccatccggccttcaatccatttgcacggaaaaataactctccaactacaataatcacccatgtctttgcaatctggattgttctccagattttcgtctccggatcaatatgacacgcttctaaaatatggtctcgaaccggctccacagcaatcccaagcatgatcaatacaaaataatacattccatagaaaatatagttccactgtgcgccatgccagactccgttcgcaacccacactgggaacagggcgattgcagaagtcaccagtcttgtaatatgctttccgcaatgctttcttccatactggttccatttcttaaccaatccggataccgataccggatagaaaatatatgccttgaaccacgcgccgagtgtaatatgccatctgcgccagaattccgaaggattcttcgcacagaacggctgtcggaagttttctggaaggcagataccaaacagctttccacttcctataatgatatccatacaaccggagaattccatataaagctgaatcacataaccaatcgctgccgcaagaatcactgctccatgatagtctgcataatggtcaaacacctgatttaccatcagtgccatacggtctgctatcaccatctttttaaagagtccccagaagattcttacataaccatcgaccacatttctatattccaatggctttcctgtatacaaagtatctgccacatctgaatatcttgcgattggtccctccatgatctgtgggaagaatccgagaaacaatgcggttctccagatttctgtctctgcctggatggttccccagtacacatctgtcatataaccaattgcctgcaatgtataaaatgaaattccaattggcattaatagcttttccggtctccatccttccaaaaccggatgtccgaataaataactcaagtttgtcgtaaagaaatcaaaatattttaaataaccaagaactccgagtaaaatcaggattcccagtattaatactcttcttccctttttctgatactctactttaattactttcttttgtttccgatccatgccttccacggcttttgcttcttctgttttgagcaaagtcagccagatgccaatacaatgggtcagaagcgttgtccccaaaagataaaccagcaattttccacttaacagataaaagaaaatccagctgaatgcaagcaagactcttcctctccatttctccggtgcaagctgataggccaacagacaaaccggaagaaataggaatatatatataattgaatgatatcccatctttgaagttctcctttttcatatgttgtaaactatactttctttcaaagtatctataaagttaccatacagatacaaacgtttctagtttaaaccttttttattatttcatcaacatcttaaagcatactctctacatttcttaagattttataaatttgtctcccgtttaaactggtatggtttatttttgtaaaagtggctcttttttatagtccacttctgttgtatagtatgataaatcttaaaggaaagaggtttttgttatgaattctaagtcaacagtaacattaaagaaacttgtcatggctgcactgttcgcagcgcttgcctgtgttgctacgatgtcaatcaagattcctactcccggaacaagcggatatattcacccgggtgatgcgattgttatccttgccggtgttgttctcggacctgcatggggattcctcgcaggcggtatcggatctgctatggcagacctgcttggaggatattttgtctatgttccgatcacatttgtgatcaaaggactggtatccctttgctccgcccttctttaccgtaaagtaggtaagaattccaaaagccgttacacagcagtcatcctcggcggtgttgctgatatcattctcgttgccggcggttactgcctgtgcgagtactttatctacggagccggtgcattcgcaagcgttccggcgaacctggtccagggaatcggtggactgatcctttctgctgtactttatccgattttgattgcaattccggatgtaaaacagacagcacttgcgaattcataagttttgtttattaactgataagccctataatattgcacgcaaaattccccatgggaagacagaaccttcacttcttctcatgggggattttgttgtatctaaatacttattttcacataaagaaaaaagtccggaaacaatcatttccagactttctaagaggcgcagaccggatttgaaccggtgaatcagggtgttgcagacccacgccttaccgcttggctactgcgccatatcttaaattttattacagccagcaatgctttctgtaaaatgaccccgacgggaatcgaacccgtgttaccgccgtgaaagggcgatgtcttaaccgcttgaccacggggcctcaacgatcactttcttgcgtgaccgttttatataatatcatatgtttttgtggaatgcaagtgtttttaaaaattttcttttattttttcatcacagttcaagaatgtaacagttactcaccatttttcacttcgaacctgctgattcccatcatgctcactgttccatccgtgctgttcgtatcgatctcgcaactattataaaaacttccgtcttcataccagttatatacatttacaagctcggattctgtatgttgggatgcttctccatatgctgcctgaacgacatcaattgccgttcctaactggattcctcccgggaatattactgccaggtcttcgtttctcaatgaatactgttccacatagattcctccgaccagacaatccttcgcttcttttacatcattccctgtgttgatcagatccaccatgatcgtattcttggaagcatctttaaaccaggcattctgataatctcctgcttcaatctcatactcctgcggaaggcttttttcatccagcgtaagtccagtgctttccaggtctgcgattgtacacggaagcgtcagtcctttaccgttaatctgaacggtataagaattccagcttgctccaagttcttcactttgtggtgcggcaccttctatatccgactggattcccttagcggcttctgcttctcccgctgcttcctgattctcttcttccagcatttcatctgtattattctccgcttcgtcctcaccgttatccttcgcagattcctttacagcctttggcactttaatcttctttgtatcattataggacacaaatgtcacttccagtgtataggatgtcacctgtgcattctcttctcctgctgccttcaaataatctgtcagatcaaaggtaatctttgccggaagtatattacttctataaatatcaatcacacagtccacttttatgttgttcaatttctgctgaagctcctcgttgttttcctcatcctcggaagcctgtagattccagcctgacagatcagaggaatcttctccgagtaaagctttcagcgtatctgcaaatgtctcctggaactgtgttccactgatcgttcctgtcagctcaaagcactcttccttattcacggtcgcaagatcctgtgaaacgctgaatgctccggacagattctgaagtccatcgaacaataccgtctgctgtgaagatgtctctttctcctcaacagcgttcttctcccaggcttcatccgttccactgtagatcacagtcttcccgtcttcttccacctgataagattccatctcctgtgtctctttcgttccggccatattcgtcttctgctgaccttttctgtgtactgctgccggatctcgtgtcatctcgatatccagattgctctcctggctgattgcactgtcgccatcacccatctgcagttttacgatctgattctcttctgccgattctactgatgtcatattaacctcaatatcgcggaacagattctccggtgtcgctgctttctgacagccactcagacttccaactgccgcaagaaatataattcctgctgttaacttctttatccatttacatttcatagtttgtctttcacttcccaagtcgtatattcaagaatgcctcgacattcttgctactatctcttatcgtaaccagctttgcacttcattatacaaaattattttctcaaaaacaatgcttacttcctgcctgtgacatctcatcgatgaacaatagttactgttcacacggtgtgcgaccagcaacaaacaataacccgagcattcccctatcgtcttctattttcctactatttttatatgtttattgggtttttctattgactttctcattgaaatactttatcatacttttcatacttgtttaatatgttattttgtttgagtgaggaatttgcttatgaatatcttatgctttggagattcgaatacttacggataccgcccggatggaaccggacgctttgatgaaaaaacaagatggacctgcctgcttcagaaaaaattcagcaacggacatcgcattatcgaagaaggattgtgcggccgcacaactattttttcggacgcttttcgcgaaggccgccgcggattagaccagattggaatcacaatagagactcacaatcctatagatcttctggttctcatgttaggaacaaatgactgtaaaacgcgctttaacgcttcttccaaaacgattgccaaaggattgattcaggttattgaaaaagcgaagaaatatagttctcagccctttgaactcttgatcatctctccgatccatcttggcaatggagtcggagatgacggctttgattctgaattcgatcttgcgtctgaacaggtttccagacagcttgcacaggaatatcggaaagttgccactcattatcacgccggttttctggacgcttcaaaaatcgctcttccaagtgaaattgaccgggagcatctggatgaatccggtcatgcagcacttgcagatgctgtttataaaacaattactgaaagtggattgcttgaaaaagggatggactcttctttctgtcatattgcataattcgtaatgtgcgccgctaggcgcacacatcaaaagaagcatcatctcggtgcttcttttctttatgtaaatatgctataatacatcaatacgttcgtgtacaaaagtatacgcacttttacaggaggactacacatgggaaaacatgagaaagaacgtgacggattcaaaagccggacaggatttatccttgcctgcatcggatctgccgtcggtatggggaatatctggcgatttccttacatggtatcagactggggtggtatgacttttctgattccttatattttatttgtaatattgattgcttctaccggagtgatcgaagagatggcgctcggacgcgctgccaaaggtggaccaatcaaagccttcggtgtctgtacagaaatgcgaactggcaataagaaaacaggtgaattgatcggactgcttccggttctcggctccctcgcacttgcaatcggatacactgttgttgtcggatggattttcaaatacactttccttgcgctgatcggacagattgccggcatgaaacaagatatgaatcaaattggaggcatgttcgacagtactgcttctgcttttggtaataacctttggcttgtaattgcagtccttgtaactgctgtgatcatggcaatggggatttccggtggaatcgagcgtgccaacggcgtaatgatgccgttattgttcgtactgtttcttggactcggggtatatattttctcccttcctggttcatcgaccggatatcgttacatcttcacgatcaatccaaagggacttttagatccaagactttggatctatacttttgggcaggcattcttctctctgtccattgccggaaatggaactgttatttatggttcctacttaaaggattctgaagacctggtaagttctgcaaaaaatgttgccatcttcgatacaatcgctgccttactcgctgctttcgtgatcattccgggaatggcagtcggcggtgctgaattatcttccggcggcccgggactgatgtttatctatctggtcaatgtattcaacggaatgcccggcggcaagattgtaggcatcatcttctacatctgcgtactttttgccggaatgagctcacttgtaaatctatacgaagctccggttgctacattacaggaacgtttcggattaaagcgtgtctcagctgttggaatcattgcagcattcggctgctgtatcgcacttctcatccagggcatcgtctccggatggatggacgcagtttctatctatatctgcccacttggagcaatgcttgcagcaatcatgttcttctggatcgcagataaagaattcgcactgaaagctgtaaatactggacgtgagaaaaaaatcggaacttggttcttgccacttggaaaatatgtccttgttccactcgcacttgttgcactgattgccggcgcagtactgggcggaatcggatgatgaaacaataatattgaactataggtgcgcagccttttttatgcgtaactgttcagagcccaatgtcatttgattagcattgcgtatcttaaatggttagattttcaataagtggtctaaccattttttaagggttgacaaacacaatagaatgtacgtgtaggctgctgagaaaaaagaagtgtttcatttgaaaataatagacaatagtactgaatctcaaatttcagttgaagaattggagaaaacagaaattaccgacaaatcggcaatggataatgactcagatatcgtagctttgctacgagaagaaaattgaatttgtaaaaaaatcaacaaatgctgaaaaaagaatcctgcgagcaggattcttttttcataaaacagttcaaactcatttgcatctagctttctttaagtattttgtactccttttcaatacctgaaataagtgttttcattgtatactcaaggatctcatttccgtatgctgcggatgattctctgactggatgacgtcctgcgattccgatcagattactttcattttctttcacctgtccaaagtctaccaactccggacgtacagccattacgatagatgtttcattcgctccggcatggtcattctgatatttcaaccgatcatcatctgcaaatgtccaagcagtcaaaatgcgcaggccatatttttctgctgcttcttcctttagttcctgaaatgcatttgttgatggaccatgtccatgtccgactacgatacgtatacctgctctggacagttgggcaaagatactgcgcagattgtcctgaaactgacctttttccatccaataggcactgcctttcatctgctggacgcaatatgtattcagtgcgccttcggtattaatatccattccataaaacgcggtccccctgtcataaaacacacgatcaggtcccataaacaacatcggaagtactacgccgcctactttttctgccactcggacaaacaactcttttgactggattccgtcagccccaagaggcatatgtggaccatgccattccaatgtgccaagcgggagataagcaaccggcatctcctgtattctctgcacgcattcttccggaagtaattcctcatataatacttttttcattctagtctccttatcctttcactgctccggcgattactccctgtatgatccatttctggcagatcatatagaaaattacaattggtatgattgccagtactagcatggacatcataagtccaaggtcaattgatccatatccacctctgagatattggattgccacagaaattgttttatattcagaaccaattacaagatatggaagcagataatcgttccagatccacatggcattcagaattgcgactgtcataatgatcgggcgtatcacaggaaacacaattttaaagtaaatttgcataatagaacatccatcaatcatcgctgcctcttccagagaaactggaattgatttaatgaaaccggtaaacataaatacagacaatccagcaccaaatccgacataaataaatatgataccaatcagattgtccaaatgaaacatatttgatactttaacaagcgtaaacattaccatctggaatggtacgatcatagcaaaagcaaacagatagtacattactttagtaaaacgactttttacacgtaccagataccatgctgtcattgaagtcaggacaacaataagaaacacagaggctacagttataaataaagtaataaaaaatgcctgcaaaaatccggtcttgatcattccttctccataattcgccaaccctacaaaagagtcggcattaggaaacgcaaacggcgtactgttaataaacagtttgctcttaaacgaattcataaatacaatcacaatcggagcgataaataaaaccgagattacagtaagaattaagatcagtatgattttactcttcttatttttcattagttttcaacctccttacgccgagtaataataagctgcgtcactgaaattgtagcaacaatcagtaaaaacatcactgctttggcctgtccgactccctcataacccattctgttgtagaatgaattatagatatccagtgcaaccagagaagtcgattttcccggaagtcccgcggtcagagcaaggtttaagtcaaacattttaaatgcatttgttgttgtcataaataagcagattgtaattgcaggcatgatcagaggcagaataatctttctaatcatctgtcctcgcgttacaccatcaataagtgctgcttcttttatttcctctgaaatattctggatagctgcaatgtaaataaccatcatatatccgatcatctgccagttcatagcaagcaccattccccagaatccatatgccgcatctgcagtaagcgttgttttgaaaaaagaaagaaatccattaataattagctgccagatataaccaagcacaattccgcccagaaggttcggcataaatataactgttcggaaaatatttgttccacggagctttctagacaacacatatgccagcataaaggcaattaagttaatcgtcacaagattaacaagtacaaatttaacagtaaacaggagagatgcaaggaaatctttatcccggaatgccacaatataattgctcagcccaatccactgggcatctgtaactgttgtaaatttagtgaatgaaagataaattcccagtacaaatggaataataaatgcaataataaatgcgatcagcgttggtaacattaatatcacaaatctctttttaaaagctttttccatcttctatacagcctcccttttcgtacacagggcagaaacatttttgtctctgccccataaattttgttgcttttcacgcattgcacaaacagcaacggattttaccgctgctttgcattccaaagcagcgaaatctgctacattcactgtattatgcggcattttccgttcggaaaacgccagcctataaactctactattgtgcaagcagagctttttctgatgcccagcaatcagttgtctgcttaactacatcatcccatgtcatatttccttgcgcatattcaaggagatagcttccaagctggtttttaaattcctggctcgggaaggttgtaaagtcccaggtaatagaatataaagaatcatcgttcatataactaagcatatcctgtacgagcggattatcgggtctttcatcctcatcaaaggtggagaatggcgggatcattccaaggattccattgcagtaagcttttccactctcgctgttaaacagccattccaagaacttctcagatgctttctggtcagcttcagaaaccttattgttgatacagatatagttttctgttccgacacaaagtccctgtttttcttcgccttctactcctgtataaattggaaggaacttaatatcttccttttttaccacgtttccatccaggtcatagatcatggcccagccccagtttccgttttggatcatagctacatttccagtcgcaaattcagccatggattcctcgacatttttagatccaaccatagacggttctgtacatgaattattcagatagagatcaaaaatatttttaaagtttttattatatgtgaatttgatctcatccagattatccactccgtcagccttgtattcatagtacacagggatattcataagatgagtctgccaacgccaatcttcgccgggagcaaatgaagttgaaccgaaaactccctgaattccaagatcatctttatgttttgtcatatcttccaccactgttttaagcgtgtcgaaatttttaatctcttttgtatctgaaatatcaactgctttatccggaagcgcaaaatatttcttcataatagcatcattataaatgattccatatccttctactgcatacggaataccatacacaccatcgccatcggtaattgccatatctttgtcagtaagccattcataaagttttgaatctttcagatcagcacaatagtctttccatgtctgatatccaatcggaccgttaacgttaaaaagtgtcggcatttcttttttggaaagctcagattttaatgtctgttcataggttccgcttcccgcagtaactactttcatatcaattccggtttccttggtaaaggttccggccacttcttcccattcagaagaaagttcagatttaaagttcagaaaatatactgatcctttatctgtatcttttgcggatttaccactatttccacctgctccgcatccggtaagcgccagcagtaacattgatgtcgcaataccagtagcaattaattttttcgctttcatatttttcctccaatctttttaatgactaggaagccccacactgtcccgaatctgcagaagatattcatttcccttttcatcacatggtctttctattccatcctgtagatacaacatgccgtttataatacattttgcctgatattctactggctggctaattgtagacaaagatggcgttacgcgtcccgcaaacggaataccgtcaaatgaaagcacagatatatcctctggaattctataaccctgcttcatgatccaggacattacctcgatcgcaacttcatcgctataacaaaacaatgccgttggcggcttttgaggtacaaatatcttttctatcacagaaatcacactgtctttttcacattctccatgaagctggccgatcagagattcatcttgatcgagatttatctgacttatagcttttaaaaagcctcttttccttgccatgaggaaactatcatctatttcgtcaatacaaaaaatgcctccaattcgtttgtgaccaagctgagcaagatagcacacagcctcataaacagaactttcgtttttttctatgatgttcaagcgcatttccggtgactgcatatggcagactttaattctgaaatgttcttttatgtacgcttcctcttcctgcgaaagcagaaaaaggctaaagcagacttcgattcccctgatttccagttctcttagtacctctagtttttcctcaaatccagaattacaataacgaataatacaaccataccccatcttgcatgcaaactcattcagataacgaaacagtagcagctgatattgattgatgtagtttgtcattataaaaccaagtagtcttgactttttacccgccagattctgcgcgtaaatgcttggattataattgtactttctgatcgtatctattactcttttctgtaactcctcgctgactggtttggaacgattgatcacacgagaaaccgtagcaatcgaacactcgctttttttcgcgataaatttaatgtctatattttccatatttaaaattcctccggaagaattctatacatttatcatacgggaaaacgtttacatttcaattgtgaaatagtcacaaaattagtttccttgaaaaagggggctctcccatctcatagtttagtggaaccaaaacgaaggaggattactcatgccacgaataatttattcgttggtttaggcggtattaggctcggatttcaacaggcaatggatggacttgagttagaaacggagtgtgtatttagtatgaaattggagctgtgtatgacaatgcgaaattagattcaatgttaaaccttaaaggatatgatgaaaaggcatattttttcatgttagacggtgaccaaaatattacttatacgaatcagagtgatgataaattcagcactatcttccatccgcacctatgatgatgtgatccaatagacttatgttcatcaggactcctgcgatagccactcttctcgttgcttccagatcctctgcactggccgttggatttcctgacggataataatggatcaaaatgatggaagctgctcttgatacgatgacggttctatttttatttttctattccatcctcattctcacttcaaatgtcgttccaccctgctcatttccgcgaacctcaatcttcccatcatgcacccgcacaatttcacgcactaacgcaagtccaagtcccacaccgccaagctcacgacttcttgacttatctagccggaaaaatggttcaaaaatctgctctcgaaatgtctcatcaattccattcccagtatccgcaactgtcaggacaacttcattcttctctctcttcgccgatactgtaacggttccatctacccgattatatttaattgcattttcaacgagattataaatcatccgataaatcagaatatcacttcctgtcaatatcaattcatcctctggcttttcgttactgttcacactacatgagaccagcaacggctcttctgttccatctgatcttccatccgacgaattctgtgccttctgtaacagttcaatattcttttcctgtgccagtggttccagatccgtcagcacttcctctatcaatccctgaatctcgatcttttcattacgtgccaccgtttgtaattcactcatatccaagagtgttctgacaagcttgctaagacgttcattctgctccgtcaccatctggatggtttcttctgccacatctccactctccggatgttctgttgtatgataaagatctagttgtgcttggattaatgctaaaggagttcgtagctcatgtgctgcatttcctgtaaactgacgctgtgtctcaaatgattccgaaagtcgcaaaagcatcttgttataagaagtacgaagtcggtctaattctgcgattctattctcttcaatcgtataatccgccagattctgtgcctgaaccttttctactgtctctgaaaattctttgagtggttttaatgccctgccgctgacaaaaaatgtaactgcaccaccgatcagtgccacgacagcagtaatcagaagacttctatttctataatctgatttcgaattataaaccttcgtagcaaactgcgctgcaaaatcatcccattcattatccggaatatcaatatacactgcctccggtgcggcactttgatccgtaacagtctcctgaagcgtatcaatataatagactccgttcttatataggaaaaatgtaaggcatccacacaatacggtaatcaacaccgtcgtaagaatcgtcagtctccactggagtgatatttttttcatgctttacctcctcctatcttatacccctcaccgatcttattcacgatcggatcataaccaagtcctgctttcagtttctttctcagagaagacatatgcactcggatcgagccgctgaaactatccacagaagaatcccatacatgctcgatcagttcttcctgactgaccggtcttccctgattcaaaagaagatactctagaattccattctcttttcttgtcaatgcaaccggcttgtcttttgcatatgcagtcctttctcttgtatcaaaacgaagactgccacattccagacagacatttttctgtacaaactttcttcttgtcagacttcgcacacgggcttccagctcttgcagatgaaagggtttttccatataatcatttgcccccgcatcaagaccgtcaaccttatcagcgatctgacttctcgcagacagaatcaatacctttgtctcttcattttcctttcgaagttcccggagaatatccatcccatccatccccggaaggttaagatcaagcacgatcaaatcatacatttccgcatagatcatatccagtgcttcctctccgtcattacacgtgtctacctcataccctgcctggtgcagacttttcgcaatcatatcacataatttcttctcatcttcaacaactaataatctcaatttatttttctccattttcttaacaggaattttacaccccctattgtataatgcaaacatcgaaaggtcaataaacggttactgttcacacgatgtgcgaccagcaacgcatctcgccattttaaatcgcctttggcgatggagcgagatgtattcaagccaaaacatgcatcctccgtgtcaatcagcggagtgattgacacgggagtgaacagtaacaacaaacggactttgaacattgaaaggagtatctaaatgaaatctgaaaaagcaacacagattcttttacttgcagccggtctggtatttttccttgtcggaatcttccgcggagaagctgcggttgtgcttagcaaggcaataaaattatgtatggagtgtgtcggaattggataagaaaatgaaatcaaacaaaaaccctctggtccgcttccgcggatggatccaggcggctgcaacgctgctgaccaacattcacatcccgaatctattcaaagggaaaatttatcagggaaatgtaaagacgatgtgcgtcccgggactaaactgttactcttgtcctgccgccacaggcgcctgtccgatcggagcatttcaggctgtaataggatcctccaaatttaagttcacttactacatcactggatttttcatcctgttaggtgttctgttaggacgatttatctgcggatttctctgtccgtttggatggttccaggatctgctgcataagattccgggcaagaaattttccaccgcaaagctgaagcctctgcggtatctgaaatatgtgattctggttgtctttgttatactgcttccggcatttgtaaccaattcacttggtatgggagatcctttcttctgtaaatacatttgcccgcagggagtacttgaaggcgcaatcccactggcacttgccaactcaggaatccgttccgcgcttggacatttatttacatttaagttcacagtccttgcgcttttcatcatcctgagcatcttgttttaccgtccattttgtaaatggatctgcccgctgggtgctatttactcactgtttaacaaggtatcttttcttaagattcaggttgatcatgagaaatgtgttggctgccagaaatgtagtcgtgtctgtaagatggatgtcaatgtagtagacacaccaaaccatccggagtgtatccgctgcggagaatgtatgaaagcctgtccgactgatgcaatctgctatcattacggattttcaactaagaaacaggctgaaaataaaaactaataaaacgtaatttaaaggagatttaaaatcatgaaaaacaaaacacttagaacaaacgcaatgaaattaaaaaaggtaatcgctgcatcccttgccatttctgtactttttgcatttacaggctgcggaaattcttcctcaacaaccaatacaaaacaggaatcttcttccacaacagaaacaggcagcactgatgagctgaacaaaaaactggacgacctttaccagcaggaaaaccagctttttgctgatcacaaagatgcatgggacaaagcctttggtcttatgagcaagaacactgccggtgatgccaagaacgaaaactatgctgacgttcttgcaagtacagttgaatctaataaagactctttctctgaagaagaatatgaaactttgagcaaagacattgaaacaattcgcggtatcgaagaagagattgcaaaactcgagaaagagagcgctgcatccgaatcctccgacaacgcttcctctaaatcagatgagtccacaggtgtattcaaaggtttcaaaggaaaagatctggacggcaatgatgtagacgacagcctttttgctaaaaacaaagttacagttgtaaacttctggttcagtggatgcaagccgtgcgtcggagagctttccaaactgaatgaattaaatgagaagctcaaagaaatgggcggtgaagttgtaggtatcaacactgacactttagacaacaatgaggctggaatcaaagaagcaaaagaaatcctgaaagcacagggcgcttcttacaagaacctgactttcgattctaattcaacagttggaaaatatgccggaaacatcatggcattccctacaaccgttcttgtagataaagacggaaatatcgttggggaacctttcatgggtggcatcgatgatcagtcaaactacgatcagctgatgaagcagatccagtccgtacttgatcagaactaattcgcataagtatcatacttaggggcagttacggtttgcagtaactgcccctaacagcatttacgcggatcgtgtttctcatagtttacatccaccgtcgcacttgctatactaaactcatatatacaaactcaggaggctatttagaaatgtcttttatcagcgtttttgatgttatggggccgaatatgatcggtccttccagttctcacactgccggtgcggcacgcattgcttatcttgcacagaagatgatcaacggaccgcttgcaaaagtagaatttattctctacggctctttcgccagaacgtatcacggacacggtactgaccgcgcacttcttggaggaatcatgggattttccactgatgatatgcgaatccggaattccttcgagattgctacagaaaacggactgaaatactcttttactccgaatgaggaagaaactgatattcatccgaataccgtcgatattattatgaccaatactgccggtcaggagatgacgatccgtggagaatctcttggcggcggtaaagtccacatcacacagatcaatcatgtagaagtagatttcaccggtgaatacagtgctatcattgttgtccagaaggatgttccgggtgttgttgcctggatcaccagctgtctcagcgaccgccgggtcaatattgcttttatgcgtctgtttcgtgaatcgaaaggacacactgcttacacgattgtagaatccgacggaaaacttccggaagaaattgccgacaccatccgccagaacgaacatgttctggatgttatggtcgtacagatgtgattgtgttcaaggaggttttttatatggattttaaaaatgcaaacgaactccttacactatgtaaggaacagaatatttctatctctgaagttatgcgtaatcgagagatcataaccggagaatgtcctgctaaagaagcggatcaaaaaatggcgcgtgttcttgaaatcatgaaagaagctgcccgctctccgattgaaaaaccaatccgttccatgggcgggctgatcggcggagaggcacaaaaacttgcccagcattctgccagtggtcagggactgtgcggtgaactgcttgagaaagctatcacttatgctatggcaacccttgagacaaatgcgtccatgggactgatcgttgcttcacctaccgccggttccgcaggcatcgttccgggattgcttctcgcttttcaggaagtataccatttctccgacaaagagattcagcaggttctcttcaatgcgggcgctgtcggttacctcgccatgcgaaatgccactgttgccggtgctgtcggagggtgtcaggctgaggtcggtgttgcatctgctatggcagcgtctgccgctgttgaacttatgggtggaactcctaagcaatgtctggatgccgcctcaacagtccttatgaacatgcttggactcgtctgtgatccggtcggggggctggtagaatacccttgtcagaaccgtaacgcagccggggttgccaacgcactgattgcagctgaaatgtcccttgccggcattccacagctcattccttttgatgaaatgctcgaggcaatgtacaaagtcggaaaacgacttcccgttgaactacgcgagacagcattaagcggatgtgctacaacgccatccgcctgtgaagcatgtcatatacacgcatgatgatactattagatcaactattctaaacaattaacccggaggcaggaaaaaatgaaaccgatttacgaagaaaatgaagaaacactggaaatcgctgaacagatttcttgccatattcccccacatcttcacaaatcaatggaacttgtatccgtaacagaaggtacactggaaatcggagtcggaactgaattgtatcatatggaaaaaggcgattttgcacttgtatttccggaattgatccaccactatcaggtattcaacagtgaatcctgtaaggcgatttatgcacttgcttcaccgcttcttgctcctagttatacgaaagaattacagcaattttgtcctgtaaatccggtaattctggctcaagaagtacacccagacgtaaattatgccctgcgaagcatgctggtctatccagccgcttcacaagggcatgttctgcatcaggcatttattcagattatacttgcacgcactcttcccttatttgaaatgatagataagagcagtgttggaagtaatgacattatttaccagactgtttcttatattgctgcacattatacagaagaactgacgctttccaaaatggctcatgaccttggaatcagtcagtcctctttatcacgtgtcttctccggcacatttcatacgaattttaaccggtatctgaatgaagcaagattggattacgcctgtaatctcctgcttcacagcgaccatacgattctcgacatctgcatccgggcaggattcgacagtcagagaacattcaaccgcgtattccaggaacgataccatatgtcaccaagagagtatcgaaagcagccgcattaagcagctctttcgatattaacctctctcatatgccatctgataaattaccagaatatcctcatatgccaatggcttatatccaatcaatgaacgggttttgttccttgagcagtcaagtgccagtttcgcaagatcatcttcttttacaccaagttcttttaatccgattggcattccaattgatgcataatactgctcctgcatatcaattgcagtttcaatcgtcttctccggatgttcaaaatcaatatccatcccccatacattagatgcatactgcagccagcgatttatatttgctttgtaaacatatcttgcccaactgcaccacagcgctgcaagtcctgctccatgcgctacttccgggtacattccggatacttcatgctctaactgatgaacaacgagctggaactctcttccacactgtgtgagtccattatgtgcaagtgaagatgcccacatcatatttgctcgtgcagtataatcttccggattcttcagacaatctcctgcagcttttcgtacactcttgatcacagcctctgcaatcgaatctgtcagataggtatcctcccccggacagaaatatctttcaatcgtatgcattgcaatatctactgcaccgcatgcggtctgataaggacttactgtataagtaagaaccggatcctcaattgcaaagttcatacggttaaagagtccgttacatcctcgtttctctcctgtctttggattactgattacacaggaagaactcatctctgaacctgctgccgccagtgtcagaatcgctcccttcggaagtgtcttctgtggaacagctttaccacaatgaaaatcccagacatctacttccggattcgccagtccattcgcaatcgccttagatgagtccaaaacagaacctccacctactgcaagaacaaaatctacaccttctttttttccaagctcaatcccttctcttacaagcggaagttccggattcgcaactactccgccaagctctacaaaactgatgttttcttccctcagacaattctccaccttatcaagcagtccactctttcttgctgaatttccaccgaaatgtaccaggactttctttggatgaaactctgcaatgatcttgccgacctttaattcctcgtcttttccgaaatatacttttgttggtgtttcatagataaaattattcatttctagcactcctcattgatatccgcacggtctatcattacattcagaatctctgtatccgtggcacgcataccaactcttccaatgtatcccatgctcttaattgtttcttcaatatcatctttgatgataccttctcccggcaggaaacttttgttctgaatactaagctgaaaagccataagtgcagcatcaacagatgtcgctatcttcgctgcgcaggaaggtttcgctccatcgcaaacgattcctccgatatttccaagtgtattaatgattgtcagggaaacctgttgataggttccaccatacatataggtaatacctgcaccggcgccacaggcagcactgactgcaccacagtacgccgaaagacttccaatataatatttctgatggatcgcaatcagattgctgacaacaagagaacggcaaagcttctcatgagatacttcccattcatctgcaaacacaataaccggaagcgacaccgtcatgccttgattaccacttcctgaattgataacaaccggcatagaacatccgcccatacgcgcatcacttccggctgctgcccttgcacaggctctcgtagtaacactctttccccatacatgcatcagtgttttaccaatctgcgctccatagttattatcaagtccttcctgagcaatcgcagaattcagtttaatctgtcgatcaatgatcggctgcacatcttccatacgaacctgatccgcaaaatcaaggatatctttaaccgtaagtttcgatttatctacggtagtcttaacctctgatttataaggattatccaacagcacttcaccatccttttcaattcttgtaatattcgtgtgctgatgttcgattgttacagaagcaaaatgctctccttttcttactttagctgtaatatagaggttatcaactccttcaactaaagaacaggaacagattttctgattgatcagttctttcgttttcgcaatatcttcacaagtcacttcacttaacacttccagtgccttatccgcatttccccctacgataccaagaactgctgccacttccattcctttcattcctccggaattcggaactgtaacgcccttaacattcttgataatatttccactaagttccatttctacagaatctggaaattctccaagaatctgacgtgcttttgccgctgtataggcaattgcgatcggttctgtacatccaagagcaggtaccagttcctgccttagaatattcagatagttttcgtataatatagagtccatttaaaaggtgctcctttctcaaaataacgtaaaatatatatgaaacaagtatatactttttgagaaaataaaacaatcatttacggatagaatcacatttgtgaagaatttctatatataaaaaataagagtagatatcttctctcaagacatctacccttattttttattgtttatttgatttgatttttctgtatattccatggcttacaatcttccgccccatccgtaagtattacccattaattttacataactttcaagtgcttcttcaaaccattttgctaattttctcataattttctttctccttttttcttttattttctttttctagtgcttatcgaaaatacattccgttcatctgtccgaagaacttgatatcttcttcataaatctcatgcagccatcttttaattctcttcatcatctctaaacacctccttttcgtttacaattgcattataggcgaaaagaagatgcatttcttgccaaatccaaatgaaaagtagccaaaatctgcaaatatatcatatattaaatgtttttcttgattttttaagacatttccccataagatatgcttctcgccccctcgttttcatatttccatcctatcagatttccattggtaaatgaatgaacctatacacatttagtctatcatattttcttctttatgtggaatgaaaattcaaaaaagaagacagtgaatcttgttctcatcgattcactgtcttagatttttccagcacggattttatttattctctgcatttattttcttgtaaaatgctttgtctgtataaatctcatccttaaacggattcaacttattcttgcggattacgctgaactggtaaataactgctgccgcattcacaactaaagaaagaaagcttacagcaaagaatgccttcggattatgtgttgtcggaacaggcgccagtctgtctgcaaactgtggaactgtcatgataaacataatccaaagtgccagtgtgtgtgctctatgctgtaaccagcatcccttcttgataaagaatgcagggatagtacaggataacagcagaatcacaccacagtatacagaatggtctgaaatacagttatatgtatatgcaaagttccagaggtcatatccgaggatatagatccagtccatatccggccacatcatatctttactcttctctttagaaatgtagatacctgtccacccgcagatcagcaggatgtttaaaatacctgcgattccgttcatgatattccacggtcctgacataacccagagattgtttatcttctcgcctgcaaatgcatggaagctgtatgcctcgaaatcacggaaaaccgcctcacaaatattgattgcaagaatcagtggcgggaagcagatcacccatttatgctttgtcgcattcggaatataacgcatcagcatgaaaccaacacagcctgcaagtgcagagtaagtctttgcccagttgaaccagtttccggttccgtactcatttcccggcgcacaggttgtcggccatacaaagattgtcagcacaaccggaacaatcacaaacagtaagattccgccccattttgtttcacgtcctaattcattcagtgcgatcagaactacgaggataaagaacataattccccaggtttttaaatcaggtacattataaagtattcccatttacttttcccccttgtttccttttaaaatttttcttagattttaatttgtaactgttcagaaccaagcaaaatttcataaaacaggtgtaaaatgcttgcatttttaagactgtttttgaaattttatttggcggatacgccacaccgacgaaatgcgtagcattttggaggttggctctgaacagttactttaatttctttcaaatttatttcttcttaaattttagtttgatggactgttttaccatgttcggaagaacaaatttcagacgatcctcgtaaggaaccattctgctacattccggaagttctctatgtaacttgattgcatcaaattcacattttgttgtacaaagtccgcagccgatacatttattcggatcaacaacagatgctccacatccaagacagcgcgctgtctccgctttcacctgctcttctgtaaataaaagcttcgcatcacggaaggaatattttgtatcaatcgcatcgttatgtcctggaatctgacggctggaattatcataattctccactttgatgtcattcttatctaattcgatgaaatcatttctgttacgtccgattgtaagactggactgtggctgtacaaaacgatggattgagattgctccctgctttcctgctgcgatcgcatcgattgcaaacttcggtcctgtataaacgtctccaccaacgaaaatatccggttctgctgtctggtaagtaagctcatctgcaactgctccattgccgcgtccaagttctaccttgcttccctttaacagatcaccccatacaattgactgaccaacagagaagaatacatgcttacattctactgtcataagctcactctcatcatatgtcggattgaatcttccttctgcatcaaatacagaaagacatttctttaatacaacaccgcggacctcaccattctcgtctacgagaacttccttcggtccccagcccggatttacaacgattccttctgactcagcttcttctatctcttctacggaagccggcattgtctctctggactccagacagaacatatttacctttgtatcgtcacttgcacatctcttagagtctcttgctacgtcgattgctacgttaccaccaccgatgacaactacgtcacccttgatgtcgtatttctcatttgcattcacctctttcaagagatcaaccgcagatgcacatccctttgctgtatcattcgggattcccggaagacgtccgccctgacatccgattgcaatgtaaaatgctttgtatccctgtgcacgaagttcatctaatgtgatgtcttttccaacttccacacctgtcttgatctctacacccatctctttgataatatcgatctctgcctgtacgacatccttctctaatttgaatgatgggattccgtatacgagcataccgccggcacgctcatttttctcgaaaatagtcggcttatatcctttttcagcaagatagaatgcacaggataaacctgccggtccaccaccgatgatcgcaatcttctcatcgaaatatccttttgttgccggaactactttctccggaataaaacgtgtctcagcattcagatcctgagctgcaataaacttcttaacttcatcgattgcaattgcctgatcgattgttccacgtgtacatgcgtcctcacagcgacggttacagatatgtccgcagactgccgggagtgggttgttcttcttgatcagtgcaagggcatctctgtatcttccctgcgctgccatcttaatataaccctgaacagcgatatgtgccggacaggctgtcttacacggagctgtacctgtatcataacagttgatgcggttcttatcacgatagtcttcgtcccacatctccggtccccatttcttctctgtaggaagaacatgcttcggatactctacctgagaaccatccttcttacaaagcttctgaccaagcttaacagcacctgccgggcaatactctacacaacgtccacaagccacacagttctccgtctctacctttgcaacatatgcagatctgtccatgtttggcgtattaaataactgtgaagtacgaagcgcataacagacatttacattacagttacagatggcgaaaatcttattctcaccgtcaatatttgtaatctgatgtacgaaaccattgtcctctgcctgtttcagaatctctaacgcacgttcctttgtaatatagtgtccacctttatttgtctcaacgatataatctgccatatcgcccaccgcaatacaccattcttccggatcatccgcacatccctcatcgaatgttttacgagatcttctacaagaacatggactcgctgcatattttccctcatacttttcaagccaatgtgaaatgtgctcgattggcagagactgattctctgttgaaattgccttctctaccggaataacatgcattccaacaccgccttccggcataaatggtgcaagtccttccagtgcaatacgactcattctctcaaagaaaagtccaagctccggatgcttctctaacatcttcgcattcatacaagagaactctgcacttccaggtacgaagatcggcagtacatactgcttctcatgctgtggattttcccagttatactccaccagcgcaacctctgccatttcctctaactgcttctccagataacctctgtccttaccagtcaccttcaccatctgatctaaagttttcggctggcgcacccccatcttcaatgcgatctcagcctgctcatctgtacacaaaagtgccagtccccaatactccggatcgtactttgtcatcttctctaatccgagctttttctttgcacgccctgtcatcatcttggcaagttttaagattggttcacgttctttttcgttctcaatatagtccggataccagcctttaaatttgtctgtcatattccctctcctttttcataaatcttttcataaattataataatttcctataagaccaacataacatttgttatgtgctttgtcaaacaaatatcgatgttacatttatctttttttatgctataatcatgttactgttcactcccgtgtcaaccacactgccaagagacacggataatgcagattttgtgagtaataacacaaattcatttcgaggtgtaaataacatgaatgaacaaaaaaacacaaccaaaacacagatcaaacaagctgcaatccgacagattgaaaagttcggaattgataagacaagtatgcgttcgattgctgccgaagccaatatgacaaccggcgcgatttattattattataagaacaaacaggatttatttgacgaaatcgtcacagattcgattcatttcgcacatcgtatttttcatgaaaatgaaaacgagaaaatcaccgtagattctctcttttctaatgtagaaaaagaagctcggattcgtttcaaacgccttcaggaagaaaagctatacttacttctattatcagatgcgatgaaatgtgattcagaattttcccagaaatatacctccggattgaagtcgatcctggatcaggctgctacgctttttgcttctgcatttgcacttgatgatcgtaagcttgcagaacaattcgcttctatctttatggctacacttgatggatttgcgattcagcaagtacttcatgcaatcccagaagatgatagttcttatgcagatacgattcttgatttcttcacaacctgcgttccgtattatattgagaaacatagggagtcttgataggagcagtaaagccgatacaggaaatgaatcctgcaccggctttattttcttctatccctttctttttcacgataaaaattagctttgctcttatacattcttttgtctgcagctttcgcaatatcatacacgctgttccatttctcttctgaactgaacacatatccatatgatacagtcattgaatctacatatttcttgtctacctgttcagacgatatcccgattgcatcaagtttctctcctcgtatttccatcaacacggttcatttccaaatagatgaaaaacggttgagaatttgtaggttctatgataagatattaactgtgtctggaatacagatacaattgttcccttagttaaatggatataacgaggtcctcctaagggctaggtggaacaaacgccttttgatatgataactagataaaattgaatagatttttaagaatgtcccagtacctcagcaggatagagggttcgcctcctaagcgaaacgtcgcaggttcgactcctgtctgggacgccacaaactccgctgaaagccttattttacaaggttttcagcgttttcttatttatggctttctatttacgctgaatacgatttgttttcaatcaatcatttttcattcgatattttttaagacttttaaggaaataggcttgctaacacttttttatttttgaagaaaaatcgctggtttttttgaaatttgctaacacttttgaaattctatctttgtagtgcctgctttaaaaattgctctttcatttctggcgataaagatttaatcagttccaataatgccatatcactatcggttaagtcggtatcttgctttggattgtctgtatcatcattaagcgtagaataaaattctttatccattttttgtgcattgaaacgtctgtcctcgtcaatgatttctgaatagacatctgtaaccatttctgcttctgcgtgaccagtatcgccttgtacggacttaacatctccgtttgtcattttgagtttataacccgtacttaaatggcgtaggctgtgaaataccacaacttcataatcattttcttcacagagcttttgaaacctatctctaacaatacggctttccacgggattgccattatctaacgcaataacaaggttgtaatcattgtaggcacttcctaaaaattcctttaattcctgctggtcttttttatattgcaccaatagttccgcaactgttttaggtaaccagacaacacgattacttgtttctgtttttggcgttttcaagacaagccttgtggtacaatgcggtttttgcgttgggaaaatctttaaaatatccttttcctttaatttctgcatagcttctgcatttactcttgaaagttctttattgatgattacctttgcattatttgtagcaatggactcttcatcaataataacatcttcccatgtaagtcctgtaatttctccaattcgcatagagcaggaaaaagctaagtgcatacaaattgaaagcaaatcatcttccgtggcttttaccgcttctcgaaatgtttgaacactccacacttttcgcctagtctttggaatttttggtaacgtagccaaagacgcagggtttcttttgtttgtatcaatatactcccagcggatagcttgatttaaggcacagcggataatatcatgtattttcttgatgttcgctggttgaacacaacgaccagttgcttttctgtttgcccgtggtacttctggaacgctcaataaatcattgtagtattttgataggctttttgtagttatttcattcagtttccaatctccgataatcggattgatataattttcaatactgcctaccttaccactaaatgtactcggcgaccatttagatgtgccgtatagattaacaaaaatttctaggaaatcacgcaatgtaatatctttgtctacaacatctaactcttttttagaattttcaatctgatgtgcaaattgttcctctaatggaactatcacatatccaaatttctcttgatagtattctataaaggcttttcgctgttttgcttcttttcttgtttccagcgtgtcccatttttgttttctttctcctgcactatctaagtaccaataaataactgaaaaacttgattttctttgtttgattgaagccataattttctctccttatagttaaattccatttaaccatttatcgaaagaaacctttgatacccgtatggctttaccagcacgaacataactgaattgaccgctttttaccaatgaataagctacctttttgctaatgtccagttgttcagcaatttcctctactgtataagtctttttttcctttgtaggagattgtgcattttgtgtatcacttatcactattaagacccctttcatttgtgacagcaacaaaacacactcgtctaataaggtcattataacacacctaaataaaaagagtagatagattttgttgctgaaactatcaattataagcaggcagacggctttggaaagctccgttagtatctcaactattcccattcttgtgggcagaaccgcaccatgcggacgtatcattattctgtgagaataggtcgtggcaaaacgacttttccaacagtcgctctcggatcactgcgtgggtcgctcgctttcttttgaaaaggtcgtggcgtacagtccccgtggctcgctatctcacaaacgtatctgtctgctttattcagttgtcaaagagctgtggcgaaagcgtgttgctttcatataaaagcaggggcagagcaggagagagggggttgaacaaatcatgctctgcggttactgcttgttattcttcttcgatttctaaagcaatatcaaaccctaaaatcattttgataagtgcttctcggataagtccttttaactccatatctacgacaatatagacattgccgtattcatcatagagtggacgcagacagcactttgatatgtacgggtcataaaatgccagtatcttttcaatcgctttttcgtccccgtccattgcctgcgaaagcaagtagtaagacggctttttaaatgtttgtttcatttttactgtttctcctttagtaattttttcataagtgccaatgagttatgccgattttggaatacaccgcttctggaaatattctgcttttttgcaatttcttcgttgttcatttccaagaagtaatacatcagcaaagtttcacggttacgctcggacaactgtttcaaggcttctgccaattcatcatcatagacacgaatatcattaccgcatacgttgaaaatcgtatagtccgtatcatagtcgtcccagacagccagattttctacaacgatttctggaagttcacaaaagagtgtttcttccttttgtcgtcgttttaatttcttctgatagtccttaacaacatgtcggacaactttcttcaaacaactttcaaaacggcattgaactgttttctggaagtcagacggtttcatcaatctcaccccctttccgttacgacgtgaaaagtagttatccctctttccacaccatatagggaacggcaggtgtgatttgttaagttgaaaccgaaaaaattttaaaaatttttttaggcatgaaaaaagcccgcacaaaacatatagttttatacgagctattagagctataaaatatttagtttttagtaaaatgctgttaggtagtgtatgattgtatagaatttcgcttaaaatgttccataatacaatcccccttaaagcatttgttttgtattatacttttgtcttttttgtaatcttgtaaatatattcttctggcgtagggcgtttatttccaaaatactttttaaaatttgcctgcacttctgggtcgttactgttcatagcttcatcaatcgttacttcaatatccgcccgaacatcagccaatgatacaccgccagcttttgcaccagctttcaatgctttttttatgtcacgttttttaagtcctaacatggtatcactcctaaaaataaaatagttcctcaaattttttatcaagtgcaatacacaaaataagtgcaagtttagcagtaggattgaattgtcccgtttcaatggaactaatcgtattcctagataccccaaccatttccgctaaagctgattgtgatagttttttttctgttcttacttgctttaaattatttttcaatatcaattcatcattcataagaagtaccttgcaatcattatacaaatatttttataagatataaaataaataataatacagctacaaagccccaacatattccgcaaaacaatgtaaatttatccttttggcgtatccatttatacatatattgaccgcataatatagaacaaaatacggaatatacatcttgatatggttgattacaatatatgtttataatcattaaaacgacacacataatcaatcctactgtcattccaatagtgctacttttttgtaaaatatccaattccatttcgtccatttgattaggctttctattctgtactttttttaaaacttcttctctgttcataaaacaccctctctttctgccaagttttattgacacttataacatatcatagccaagttttgttgtcaattattttgcatagtttacttgtcaaaaatacagcgtgcaaatctcatttaggaaatgcacgctatataatttatcctacaatcttccagttgctatccttatgtagtacaagctcatattgcgatacctgcgtagcctttgtctgattatcaaggaatttcacggcaaccttgactttcacattgtccccgtcctttgtaaagatagggtttaccaattctgaataaaggtagtccctgccgataggttcaatcacatttccaaatacataataggcaagctctttttctgtggctgttggatagaacttaaagaatgtttccagaaaagcggtagcgtcattgacagtatcagcgtctacacttgcgtctgcttctggtgtcttaggctcatagtctgatttttcgattgctggtgcaagggtagggttctgaacgattaccatatccccgtcagcgtccacatggacttttacggtataggttgctttcacattgcttgtctgttctccctcttttatctgctgatctacttcgtaggtagcagaaaaagtgtccgttcccgactgttcaatactccatacaatcacatctgtaactgtggagctggtcggtatatcggttctaatggtatctatattcaagtcttgcaattcctttgtcagataaccgttgattgcctgcgtccttgcttcaatcgcttctttgctgttattccatgtgtaataggacttcgcaaagtttttcacgaaattttctatcccgttggtgtcctgcaagcgaagttcaatgatttctttttcatgggtcgtgtgctggtcgatagccgtaaaattcttatacactccaaagctcacgcttgcgataagcaccacccacaacgcaatcacggttttcttatgtgtgcctaccttaacagtacgcacctttttttcttttggttctttgagagtttctgtctgtttcttattcttcttaaacatatttttcaagtcctttctattgttttactcgtcctgcaccgattaagtgctgttgccagtaactactacttaggtctgcatatcctatcgggtcgcctgcatggtacatctgattatttcctacataaatgccgacgtgggttacatacgaaccagcgttataggtagaatggaaaaataccaagtccccagcctttgcctgcgagagtggaagatgttgggttgcgtcatactgggcttgtgctgttctcggtaaggagataccagcttttccatagcaccattgcacaagtccgctacaatcaaaggaagtgttcgggttactgccaccatacacatacttccagccttgatatttcaacgcttcattcataatcgcttgtgccgtcgcattatcaaagtgtgccacggtcagatattgattgactaattccacatagaacatatttccatagccataccgccagcccccattctttgcaacggctatcgggttggtgtaggttactttctttccacctgatttttcacgggcgaagttctctgcaagattaaaggtgtgtttctttccttttcctgccacatatcccacatagccaccgccatagttataggactgtatcgctacattcaaatcgtcgataccttgatttttgcaggaagaaagcagggacgcaaaatacttacacccctgcttgattgagctttccgtatctaaggaattaggcggtaaaccaagactttccgaactctgcataacatcttctgccgtaccgccactttctacttgaatgatagccaatagcacattgacatactcggaaatgccgtattctctggcgtatttttctaccataggctgatgtttcaagacttctgcggataagttcatacccgtaatgccagaagaaaaattgctgttctcgtcgtcgctgtctgcactaatcaacaccccaaagaaaagcaccagagaaaagaggataggaaacagactgccaatgatagcgatatgtttcagtttcattttttcttctgtcctttcttcgttacaaggttacgagttttctctgttgtctgctggttcttttggacggtttgcgtctgctgaacctttgtcctacggtcttttgtgtaattctggcgtgtttcctgcgataccactttttctacattctgcctatgtgcaggctgtaccgactgggtcgctttcttatcagaagcacccgaagataacggacgctctttgataacatttgtcttgactggctcacttgctttcggagttggagctgtggcagggcgtttgacttcctgcattttttccgcactcggctttgaagctgtggctggtcgctcatggggacgggtagctcccgttgtcgctgatccgtcagcctttcgctgtgcctgccttgcttcttgtgccttttgaagctccatacgtttgtcagcgatattctgtctatgctgttcctgcttttccaaacgtcccgtctgtctggactgctgttcctgcaccatgccacgcttaaagtcggacacgctggactttgcctttttctttgcggaatacaccgcataagcggtctgtgtcggcatatccttgatattctctttgacagcatttgccttatccttgaccttatttttcgtatctaagacagcccccacctttgagcctgcacgttgtcccatgctggaagatgtattaccccgactgtcttttgtagctgtgttccttgtcggttttctgtttgaaatcgtgctacctgccaccgcaccagcaacaccgccagcagtaaccgcaccagcaagccgtctttccatacgtctagccctatgtgccaaatatagatatggtctgcggaatatcctgcgtcccatactttgactgtcgttagcgttcaaagagaacatactcattaagtcgcccagcttcatatagataccagcgaaacatactatttgcaagaaagctaccatgaaaaacggatagtccgtggatatgttataaaacatactggaaatgctgaacgccaccgttacaatgagtgttattcctgcccgtgtcattatggtattaaacacccttacgattgcctgctttgccatgctttcatagctcggtatcatggaaagtagaaaactgataggtaaaaacattgcaaagataataaaaagtatctggctaaacaacatcatgcccgtaagcaagaatacaaatatcgtgatacctagattgaagaacaagaggaagaacaccatacctaaacggtttaccacctgcggtattgtcagattgttgttgtcgttgtcctcgatttctgttttcacgacttcctctctggtcttaccgtcctcgtcctctgggcttgtcgatacaagagcttctacacggtctgtcccgatttcctctgcgttgctgttaccgaattgaagtaagagccacggctgttccacttgaatagaaaataagctgtcccgtatcaagtccacgctgtccttgccctcgctgtcagagttggggagcatgatttttgttcccaaatcaagtgaagcggtactgatgtctgatgaaaactcatttatcttcttgatgtagtcgggagcgtaggcaataaacgaagcggacagcacgaacactaccacaaagttgataacggcgtgaagtgccttgctggtttcccgttttatcagtcccgtataggcaacatatattcccactactaagataatgagaagcaggaaaccgacataaaagcccgtggaagaaaagccgttctcggtaacgcctgcaagggtctgtatgctctgaccgatactgtctgccatatcattgatgaagtccagcttataggcttcctgcaccacatagcccgtggcattactcaaatataaactgatagtccagacaaagttggtaatgcagtaaagcccatactgcaccgattttccgataccgtccagccagttccacggaagccacgaccagctattatccacataaaaatcaagttggtagttggaaaggggatattttgagtaaagattttctgcgtttatggtatcgtccacaagccccgttgcatgagccaccgttcccagaagtgaaagcaggataagggagagtgccaccacgaacagagccattttgagaaagtgaagtatcttcctttttgtgaacgcaccttttatcctttctttcatcactccacctcatttctctgtacgggcggtctggtatcaaaggcgtgtagcagttcttcaaagactgggtgtatctgtaccacaccgacacgcccgtataagtcctgcaataagcattgtccgttctccaaatcacgcaagcgtttctggttgttctcgtcgtccttgtcgataccgaaaaattctaaggtctgctttatctcgttgatgtcggtactacgaaaggcaaatttcaagccgatattgtttttcagactttcctttgaaacatcataggcagactgggtaacaaaataaacgcctgcctgcatagctcgtccagcacgaaccagcttgttagagagcgtttctccttgtgccacatttaagaacgcccacgcttcatcaaggtctacaatcttaaaaatgcttctgtcgctgtgaatgaagtcgagtgcaaaggtactaatcacaatcagcattgccaccgataataattcaatggttgtgtattcattaaaagtagtgtctttatctggcaatactaagtccgctacttgaatgatattgagctggttatccagactgatagcattttctaccgtaccgtctgaaaacagcaggtgtgcaaagtcgtagtccgtgaagctgtcgatatggtctgcgatatttcttgatatgggcgtatcttcacggcgtagctcgtctatcacatggagcaagccccgactgtcgctctgggtaacggaacgcaccgcttttcgtaacacggggaatttttcgccgtccctagaggaaatacccgtaaggaatgtcaagatgtcgattgccagactttcagcgtctttaacattcttcataatcacaaatgggtcaagaagtcctgcattatctttatcgctggttaggtttacgatattgatttcatgggcgatttctgggagcgtttctttccaatttccacgctcacttttagggtctaacagaagtgcttgaccgccaaacagcaccgcataatataccagaagattgttgcagaacgatttaccaccgccaagcgaaccgacaaaagcagaagctaaagcgttggtaactgtaccttttataccttgactggcaagggacggttgcaggtacacatttcttcccgtatcaacggaatagcccatatagatacccgtagtttctcctaactgctgggtcgctccaaagccaagcccagccaagaagtctgattttacatactgcacatagtcgttgatatatcgcttgctggcaggaagaaattcagaatgaagcccaagcatatccccagcaggacgcaccagctttacattgaggtcgtcgtaaaagtccttgacttcatcacaacggcgtttcagctcgtcaagatcgggtgcagacacccgtatcacgtagcttaacttatacatactttctttgctctggtctaagtctgtttccagctcgtccacgctgtctaaagcgtccaccacatttgagctggtttcacttccagcttgataagcgtgattgtcaaggtctttcaattcctttttcttgttgcggactgtcgttaatgcttttcggttctccacgatttctacattcatagaagtatcaacggggaatgtgaattgctgttgctggaaatagaagatttcagacgacggaaaatcaagctccccgacaatcgcattgacgataaaataggacacatagctttccttgtcctcatgctccaatcttaaataccgctggctttcctcaatcacacaccttgtcggacggataaggtcgtagtattttatcagcgtttctttctgtaatttcttctttggtagctggtactcataatcttcataggcgataccgtccctaccgtaaagatgttccatgagatacccaaaatcgttgatttccaagcgacgcaccttaaagcgacgggagattttattttccagtaacttttccattttcgtgtaacggttgatttcatcattcggcatggaaacaaaatcattcatcagcgtgtggttcacttcatggagaaattccgtgaacgtcagccacgccgattttttgatgttcttcagattgagctgttcttccgtaaccatgagcttaaagccaagaaaaaagcggtagtccacttgattgtccccaatcatagatactaacgcttcggtctgttcgtctatcttctgataggcaacttcctttaattttcccgttaccagcttctttgactgctcctgcatacttcgtatggaactttccgtcgctatctgcaaggcatgaattttaccctcacgggactgtgcgataagctgtcggaaactgtcatgcacgataaatttctgctctgcggataggaaagaatagttgtacggtatcagctcatagtaggcgaatacctcattgtccttgttccagacaaggttattgtcaatatattttatcgggaacatacttcacactccttactgccgtgattgtttcgttgaatgtttccttttgcagttttacggcttttcctgcataagtgattttcggtcgcagggcataagttatctgtgatttcaaaaagctgtacggcttctttccgtcaaaggttttctgcgacataaaccaagtgagagcaacgggaataccgaagtatttgagaaatgctccctcaatcatggaaagtgggggaatatccccaaacagaatgatgataaattctgtaatcacaaaccatgtaatctgtgtaaaagtaacgggaaagggcaagttaaagtcattgattgcatacaagactttttccacgttccagatacccgtataagatttaatctttttcaagttctttcagctcctttcaaaatagaaaaggacagccatgtttcagactgtcccttaaaagagaaatacgctgtcagtagcaaccatgcttgtcgctgatcttccagcgttagtatggtatctcgcacatacctcggcttgtttcaataaagtaaccgcccatatccaaatctcgcccgtaggcttcatagtcaatgtagttctgtaagctgggtggaatgtcgccaagtgcctgcaattcgtctatgtagtagtaggcaacgtctgtcatggtttcacagtcgggataataataaatatcgtccttatgttctacgacttcttccagcgtcccgtagtggctgataaattcgtccagacactctacgatatagtcgggaagttcctctatcatttcatacatctcattgagttcttcaatggaaacatactcgccaatcgcaatagggaagttatcggtatcatggattgcgtattcctcgtactgttcattcaagccgattttttctttcacatcttcctcgtcaataggaaaagtgaaccaagcaccgactaaatagccctcattgtatttgccaagattagcaatgtaaaccgccatatcatcaatcataagcaccacctcatttcttactctggcagttcaaagataccgtgttccgttactaaaaatttcccgtgttcctgcaagtgagaagcataggcttcaaagtcaaagtagtattcttgacagtcctcggataaatgtttgaacgtcgggtcgttcatcagcttttgccttgtaacatcaatcatgcttttacagtcgtgataaaccgtaatcacgttcctacaaatataaagtgcttctaagttctcaaacaccgtaagtagtgatacatattcttcctgcatatcacttgaaagctggcggtacataaaatctaattcattgagctggtacacgctggtgtgttcgtgaacttcatcagcaaaaggcaacaccttttcgataatgcggtaatccccactttctgcacagacacctaacttttcttcaaactctgcaacatctatcggcaggtcgaaccagtatgatgttgtttcttcgccagttgttccgctcgtttccaccagcacccttgtttcctgcattgttcctcacgtcctttctgttgttttatcacatcttttatggtctggtatgacataccaaacacatagttagaaaaatcttctaactgtctttcttcatagtcggcagggttcagccgtttcatttcatgccacaccttacgcttgtaagagggcaggtcggaaatgtattcacagccgacgtttgcctgcatatccttaaaaatatcgttcatttcatcactccaatctgaaattttggcaagaaaaaagcagtcaatcctaagactaactgctttgtgtgtatagatataatttgattaagttttaaaaccagcttattttttcatctctaaattgagggttatcgctgtgctgatatggattgtagttattcaaattgcaaccatattcttttaatgatttgattttgttatcttctgtccattcaattaaggaaataccgtcaaattcttcaacatttcccgtattcatttcatttttaaaataccattctacgacagtttgattttctttatgaaagaactgtttaatatcccaaataatgactttaccacgggtattccattcattaaaccaatgttttactgtttttagattttcatatttaggacaccagctttccgtataaacaacatcttctgtaaaaattttatccattcctaaatcttgctgtttcagccacatatcaaaccataaacgaatgattttttctctctcactcataatagaacacctcaatccctaagactaaatgctttgtgtgtggatatgaaatcgtaaaactggaagttatctcttacttagaaaatagcatgaaaaaccataggaacaatgagaattaaaatcgcacctactacaaatacaacaattactttttgaaaacttcgtttttcttgttcagtcatatcattataccatttcatgagcgactacctccacaacttctaattcgtcactttcttcatatccatatcataacattatcatatcagcactgcaataaaattttatgcaccgataatcttattgaacagttctaacagtacatctttcacaccgccagcattgaatactaagccgacagcaatcaaggcaactaccaagaaaccgataagtttggaaaactcacgcttgaaccctaagtagataccgataactacaatcgccataagcactaagctctgtgcgtttgataaaaaccattgatataaattttgtccgaaattcatttaattgtcctcgctttcatttaattgtttcatttcacagtcagcttctttgccgacattcaaaatacacatcaagactatgccgatacccattcccatagataccagcaggaagtcttttactaattcccacatttttatcactcctaactttctactaaatcttttgcaggggtcgtctgctgtttgattatcatttcatgcttttctgtgagctttgcctgctgttcgattgtttccatgtagtctgtaccgtttcccttatcaatctttttcagcattttcaaggtcggtgctacctgcctttgtacccaacgcaatgtacggtctaaagtataaggctctggctttgtcgtcagcttcaagctctgtctgttatcgccgataaaccaagcccagcggtcattgagtttccagtcattttttcgcttgtctggttcttcatcaacaaaccgcacatactggttgatgatagaaaaggcggtctgctctgcgtcataataagtcagcaaatctcgtactgcataataggcacgttcattccgaagccgtatctcaaaacggttgataatgtcggcttcttccagaggtgtccccaacttgacgtactgctcatagtccttttcatagatacagaaatacacatcagatttcagcgaaccaagataaagggtacgccccatatattctctgtcgtcctctctgtgcttgataagctcgcccgactggtagaacttataacttctggactttccaatatattcccgtttcctgcatttttccgcaagctctggaatatccaaaatgcccgtatggtcgttgatagcaaggtcaatacgcttcatcacgcccccgtctacgagtgcgtccatgaggaagtcataccagcttctttgctgtgccagcaggtaactttcaaactgtctgcaaccacgcccctttaactctaaaaggacacctttttcttcgtcagccgacgtatagataaagatgtcccctaaagaataatgctccgtataactgtaatgtccgtaatcttcatggagcatataattgatattcagttttaatatgtctttgatgatatgctgtatatccagcgtgggaaaacgaatttttacataatcaaacagcatggtaagcggtgcttctggattgaaccttgccagttctttatgtagagtttccaaaagctcctttgacggcttcatttttccactttctatcttgttgagatattcccttgtgataccagaagccaccgccagcctgccttgtgagataccgtaagcaatccgtttctcccgtaattcttttatccattgttcttcattcagaaccatacccccaatctgtaaagtgtgaagttttttaaggcgacttcacagccgatttttactaggaaaccatgccagaagccttatgtttcctatgttttttgtctattgtctatttgcaaacgtacccctctgttagataccgaggggttttacctgctggcgtggcttacgccacaccagcaacggctagtccgtgccgtcacctttcgcttcgcacgtcgccgtcccgtcctgccttgcgttattcgattaccagcgtgaacgcttctggatcatcaacaatgttgtatgaaccgagcgtgtccgctgtctgtgtatatcggaaatgaaacaaaggcttttgtcctttcatggaaaaacgggaacggtacaccgtaccatataaagcgttgggctttgccacatcatagctgaacagagtagaagcaaaatcattctccctgcattttttgatgatttcctctgcacacttttctttatctgtaatgataagacggttgagcgtaaaggtaacgtgttcttcatggaaattttctgatgaagtccccatacttcctactacatcaatctcacgtccccattgcagataggaaaccgccactcccagcacaaaaagtaccgtgattgttattatttttctctttttgcacatactgttactgtcctttcttgtagggtgtattataatacagtctacgataatacatcttatttatcaatacagttgtatcttataattcaaagaaaagacgaggtacagcgtatgcaggtatatattgatttagaaaatcttttgaaagagaagaatatcagcaaaaacaaagtctgtgaagcgtgtaaattacagcggacacagcttaataactattgcaagaacaaagtttccagaattgaccttacaatccttgcaaagctctgtgattttctggaatgttccccaaacgacatattgaaattgaagtaggactgtcagctttcgttgcttgcagtccttttttcttccagcctgccgatttcttgtagaaaatcatgtcctttcgggactaaaggcgtgtaaaattcacttataacacttgttcccacatcacaatagccacgccccttgatacgcttctgaaaaaactgctttttcacatctgaaccgaacagcataccgtaacctaattcgctgatacgccccaatcccacacggaaattgaagttatctctgataccgtccgagaaatattttgcgtctggacgctgacaggcaacgataaggaaataacctgcttgtcgtcctaacatgacgattttctttaactggctaagtaggctcacgctttcttttgtccccagcatttcaaaaaatgccacatattcatcaaagataagaaagcagggtggcagtcccaaataggcgtagttttcgcccgtcttatagttcgggtgtcgcttcatttcctcgcttcgctgtaccatgccctcataaaaggcattgacgcaatcaatcatttcttctttggtgtgatacacatttcccataactgtccccaagtctgctaagtccgcatttttcgggtctaagacgtaaaggacagcgttggtatgcagtagggcttcaatgagcgtcagcagaaaataagttttaccgccacccgtcccaccagcgataagagcgtgagggagtgcgtcatattcccagacaagatttttcatcagcctaagactgccgttttctgcccgtacttcatcaatggtaatacggttcgctatcatatcataaagcagggtatattcgatatagccgtcgtgcagggtcttgtcggtcagttcacaatacaagccactttccaatttatcctctaaccgtaaaagctggtcttgatatttccccagcgtaatttcacagcggatatgaagcagtcccttttccatttgataataaatctttggaaaccagacgattttttcccttgatctgctttgccggtcagtaaaaaaaccgctgtcttgtacggtatcggcttcataccacttattttccagtaccattcttgccagcttttgacggtgcaggagcttcttgaaactgtcgtaacagaagcggtaatatagaaaagcgaccaatgcacaaacacccgtcgctatcaatatggttatgaagttgtaaggggagagcgtcaagccgttttctaacaagctgaaatgctcccaatcagtacgcataagctgtttgatattgagtagcaaaagaaccgccacgaataccaccagaagcatccctatggaaaagtggtagacaaggtgcttgtcgctggctctgatacggtgtcctttattccaaatcttacgcataaatcaatcactcctttctgggtacgaaaaaagcagtcaatcctaagactaactgctttgtgtgtatggatatgaagttttgcaaatgggaattttatattacttttaatgcaatttctagtatcaacgaaaaaatacaaattgataaaataatgataactatttcaacatttcctagtgatataaaacattgaaaaatcagcataattcctactaataatatagctgttccctcaattcttgaatgtagctttatgttttttaccccattatatcttttgataaggggcaatttacctttgataatactgaatacccctaaaaccaccattatattacctagtattagccctatcatatttaccaccttttctaaatctttaattttcagttctataaatcgaaattttcttgtttaaatttatctttgaaaaagccaattaaaattaaagcaataccaagaattgcaactggtatataaataatattaggtatatgataaacaaatctatcaattccagacatagcaatataaataattattcccacacaaattaaaatgtttttatctttcatagctggtctcctttacaccttattatttgtccgtttcttcatacccatattataacagttccatatatccgctacaatgaaaatctattcagtaagcctattttttcggctgtccctgcggtgtatggttctgtggactgcctgcgttctgattgcctttatttttcaacacaatattctctgcctttacataccagtccacatctgcacccgtataagtctttcgtgataccgtatcggctactggattgacaagctccacaactgcattgtacggaaattcccttaacggtacttctggcggtacagacacggggataattccaccatgcagactgcacttcaaatcatagatacgctttttaagctgggtactcggtgtcccgtcctcattctgcaagaacacatcacgcaccgctgtaaattttaattctccaaatgttttctctttgtcaataacaaacccgtttgataatctcataaattcttcactcctttacttttcttcaactgctacaatatcatcagcaagcaacacataatcggtatgtcccatatccccgattgcgtaacctctgccatataacttcggattgacaagttttactttctgctcatacttgaacttcttttcgccagcctgcacgggaatttctaccacaacattttcgcctttctgtacgtcggaataaaggttatagcttcgtttggctaagactctgcgattatttttatctctttcaaagactggctcgctttcgcctgcaaattcaagagttccaaaagactgtgccatatctggcacgacatatttcatttccatattgttttacctcgtttctttctatatttgataagttttttaattgtgatttcttattctggcggtttgggaagtaccagcaatcccccagatagtaaagggtaaaatcaatgcttacgcacccttgactatccgtgttcttgcaggttgtaggcagacaagccagaataagcaaaaatctgccgtttgacagcttcggcggagagcgtgattttccttttctcataccgttaccgccttatgatttcttcattttacggcgtttgtaaagatatgttccagccagtccaccagcagacgcaagcaacatcacgataaatgccattacatttgtactgtcgcccgttttaggactgtcgctaggtctgttaggcttttccggtgtcggtggtgtttcgggtttctctggttcttctggcttttccttaaaagtaatcgtctgtcccttatcctcaatatccttatgctcggtaactttcttcggctcgtctggattgcttaaatcgtataattcctcaaaagttacaagctgtttgccgtcaagagaagtagcgtcaaacgtaaaagcagcttccactttcatagtttcgctgtcagcaataaaagtgtaatcactttccacacgttttccattgataagaagttctgcattttcttctttcaacatctgccagcccacaagtttgtactgtgtaccgacttctaagccctctaaggttacggtatcaatgattgtaacgtcttttcctgctttaagctctttgttgccgtccttatcggtagcggtagtatgtatcttgatgatacgctttgtgataagtaccgtttgcccgtcgtcctcaatgtctttgtgttctgcaacttttacgggttcgtctggattgctgaaatcatataattcttcaaaggtaacaaggtttttgccacctaaagcagacgcattgaatgtataggaaatttccactttcatttcttcatcatcagcgacaaaggtataatcgttttctacacatttcccgtcaatgataagctcggcgttttcttcctttaacatctgccagcctttcaactgatactttgtgccttttgtaagtccgtctagtttgaccgtatcaacgattgtaacctcttttcctgcaaggatagtcttttcgccgtctttgctggtcgctgtggtatggatagagatttctttttcgtattcgtcagtcaaagtccctaaatcaatcacaagattatttcttgctaccacgatttcaaaaggtgggataagttcaaagcctttgttactgttgcaacgcatttcttcaatgatgtaggtgtcataaggtaatgcacccttgctgtcgcctggttcagaagttccaaaccacacaccgtcctcactggtctttcctgcgtttgtattgtgcttatgagaagcccattcagcagaagtggagaattgcccgttatcatcagttaccactacatgattttcgcccgttgtcttgcttgtgatcctaaagggaacatcagcaagacgcttgtgtgtgcctgcaccgatttttacgccctcaatatctccacgcttaatctgattgtagatagaatgggctttgtcggttaagtccacgatttttccattttctgtgattgtaaaatcaatcggttttgcaccgtctgtcaaatatccatttggagcttcactttcaacgatacggaattttccataaggtaagaggtcagcagaagtagaagcgacaccctcaatatctgtacgaatagtttttacgacttcatttttcttgtatagcttgccctcaaccaagacagaattatcatttaaggaaatgatgtcaaagacagtatctttcagagtggcacttccttgtggctttgtatcgcccgtttctaaatctcgtttctgaattttgacaccgccacggataaccttgtctgatacggaaaactggttacttccagataatacggcaaggtcgccgtcctcggtaatctgtgttacatataagccttttatctgttcggacttatcgccagcctgcatatatgcaccgtctaacaagtagccgtttggagcttttgtttcctcaacggttagtgtcccaagtggaagaacggctttgccctcctgcatatagaagctgtcgccagacaccttgtatgcgtccgctaattttgtgatgtagtgagttgtcccgtcgctgtctgtttcagcgattgtctttgtaacccatgtacgattagcttcggcagggagattgtctttattatagaagccagcataatacttccatgtaaattccgcacctgctaaagaagcgttcccctgcggattgtctttctgtgtttccatatctattttgaaaagctcaatcaaagtgtctgttacttttggtgtatctgatactttcaaggttgctgtttcgccagctttgattgtcaatgaatagattgttttatccactttatatcctgctggtgcggataattccttgatatagactgtgccagccgttacctctgcaacatctgtatttccgttttcatcagtcgtaagggtggcaagctgtttcgtgcagtccttatcagaaaagacaccgtatgttgcaccagcaacagagtaattcccgttaccgtctgtaatgctggtattactggaagtcttttgcagtttcgcatttccaacattcagtttcgcccagaattgccctaattcctgcccctcgccagagtagatataaccgccacattcatagcgtcctttattctctttgacaaaggcttttgcaccagagaaaacttcgtcctgcgtagcctttggaatttcattataagaagctcgcacgttatcacattgccagccaagatgtacgctcaatctctgccagactacacattgttccaacagatagacttgtttgtagttcaattccttgtgagcttcgccatactgtttgacatactctaaggataacgccacatctgaaatctggtcggcactcatgcgtgagcttgcgtcagctctggtcttgtagccattcttaaaatctgtattgatgtcaatacaataggcagtttcgccctcgactttcatatagccctcattgaatgtcgaaccgatagaaccgtcattcattactttttcaatgataccgacacgctcggcactttctgtccagtattgcttgctttctgcatgaacgggtgtagtcggtaaagcagtaacgacagttgcaagagctaagaagcccgtacacaatcgtttccatgtctttttcataaatctaatgctcctttcatttttataattaaaatagacgctcatttctgaacgtctataacatacgagtatcttgatttctagtgataaatgatttatagtttgattgtaatgttttctaataaattaaagctttaaattagcctttgttgctaacaacctgctaacactctacggcgtatgagggtacaccagagaatatcaacaactaaacataacaagcacttacgctttaatttacggcattaaacgctcccaagaggataatcgaacttccagctaccacggttcacagagaactcctaagcgaggggtcggaggttcaaatcctcttggcgacgggcttcaaagcgttcgaaaatgttagctggattagctgacaacgaacgcttttgttattttcaaatcacgttcgtgacacaaaattccattcaaaatgatcaatttccagctaacgcaatccgatttttgttagctgacagctaatcaaaattaccggtttgcaaacatgggttttaagaagtccagctaacatttgggttccgctccgttgtcacctcttattcggggatgcaaatcagagaaaaggcgggaaaagaaacaatctctcccaaacttgcaaacatgaattagctgaaacagtattcaattctattagctacagctaatggtcaaacagcaatgtctgtttggaactttactatctataaaagttccaggcaggcattttttatttcctgaatcctggaggaaaggagtcaagatgactgagccaaacagacaatcaggagaaaacgaagaaagaatcatagaaattgagattgagcgtcttcgtccgttcaaagagcacccgtttcaggtaaaagatgataaggaaatgtttcttttgcaggaaagcattgagaagtatggcattttaaatccgctaatcgtcagaccagtaccggatggatactatgagatcatatccggtcacagaagaaaacatgctgcggagaaactgggataccgtaaagtaccggtaatcatccgggtattaagtgaagatgattccatcttgagcatggtagattccaatcttcacagagaacggattagctacagtgaaaaagcttttgcttacaaactgaagaatgacgtattaaaaagaaaaagtggtcgaaaaaagagccaagttgaccacaaaacaccaagaaagcgggcaatagaaatcatcagtgaagattgtggtgatagcccaaaacaagtgcagcgttatatctcactgacaaaactgataccggaaatgttgcagaaactggatgatgagattatttctttttgtccggctgtagagatagctgcattaagtgaaaaagaacaaagagaactgcttgtagcaatggagtatgcacaggcaatcccatcactctcacaggcccagaggatccggcaactgagtaaagaaaaacagttgtcactggaaaagatggaagagatcatgtgtgaagtgaaaaagggtgagatcacaagagtggcattcacaaacgagcagttgcacaagtattttccaaattcttatacaccggcaatgatgaaacgggaaatactggcactgttgaaattatggaaaaaagaatcatgggaaagttaaaggaggaagaaatcatgtgtaaagttatatccgtagtaaaccagaaaggtggcgtcggaaagaccaccacaaccgtaaatgtaggcattggactggcaagagaaggtaagaaagtgttgctgatcgacgcggatccacagggaagtttaaccgcaagtcttggatatgaggaaccggatgatcttcgcatcacattggcaacgatcatgatggaggtcatcaacgaagaagaaatctctctggaagatgggattttacatcaccaggaaaatgtagatcttctcccggcaaatattgagctttccgcactggaagtaacgatgggaaatgttatgagcagagaaatgatcatgaaagaatatatcgatgcgatacgatgccgatacgattatatcctgatcgactgtatgccgagccttggtatgatgacaatcaatgcactggtctcttccgattctgtgttgatacctgtgcaagccgcatatctgccggtgaaaggacttcagcagctgatcaagaccattcttacagtaaagaaaagactgaaccggaaactggcgattgagggcattctcctgaccatggtagatttcagaaccaattacgcaagggatattgcatcgagagtacatacaacctacggaagtcagatcgaggtatttgaaaatatgatcccgatgtctgtaaaagttgctgagaccagtgcagagggaaaaagcatctacatgcactgcccgaaaggaaaagttgccgaagcatataagaacttaacacaggaggttttgaaaaatgaaaaatagaagtggcgaaaagattaaactggcaagcattgatgaactgctgggtgtggtaaatgaagaatctgcaatggagatagaaatcagtaagatccatccgtttaaaaatcatccgttcaaggtgctggatgatgaaaagatgcaggatctggttgaaagtgtaaggatcaatggagtactgacaccggtactgcttcgaatggatgataatgaagaatatgaaatggtatccggtcatagaagaatgcatgcagcacagcttgcaggacttacgactattccggcaatcgtaagagaattatcggatgatgatgccgtgattgcgatggtggacgctaacattcagcgagaggaactgttaccgagtgagaaagcatttgcatataagatgaaaatggatgctatgagaagaacagcaggtcgtccgacaaaagaaaatccccgacaaaatgtcgggaattatgagacggcagatctcattggaaaggataatggagaaagtggacgacaggttcaaagatatattcgtctcacggaattaataccagaacttttagatctggtagataagaaaaagctccaatttacagttgctattgatatctcctacatcgataaggaagtacaagaatggatttacgaatatattagtgacactggatttattaagccaaagcagattgcagcactcagaaatcagctgaatgacgggtcaatcaatcagattcagatgttatcaattttcaataactgtgtgatagcaaagaaagtatcccggtctcttactttctcagaaaagaaactgacaaagtattttccggatgattatacagccaaagatatggagcaggtgattgaatcattattagaaaagtggatgcaggaacagtcctgttaaggagagaaaaagctaagaaaacaatgtcaaagaagtttaaaaaaaggacttcttagcagaaaatgaaaggaggaaattatggagaaaaaaatgacatttaattatttttatggtaccgaagctgatcagttcagcttctaccgcataccaaaagcattatttacagacagctattttaaagatttatcaagcgatgctaaaattttatatggactgatgttggatcgaatgtctctttccatcaagaatcagtggtttgacgacaaaaatagagcatatatctacttttccatcgaagatattatggaattactgaactgtggcagaaataaagccatcaaatccatgagagaactggatgacgaaacagggattggcctgattgagaaacgtagacagggatttggaaaggtgaacgtcatctacgtgaaaacctttatgcctgagaaaacagatgagaaaaaatttgaagaggaattaaagaagtttaaaaaacaaacttctgtggaaaatgaggaacccgcagaagtttacaattcaaacttcatgaagtcccaaaatcaaacttctagaagtcccgaaaacaaacttcaagaagtttacatttcaaaccctaataatactaatcttagtgatactgaaatgaatgataataaatctaatcctatcatatctgtggatgagaaaagatttgatagcgataatcgctctgaggattatcaggcttatgaaaaccttgtcaaagagaccattgattatgaatcactggaagtaacccatcatgacgatatgcggcaggtagatgaaatcgtgaacctgatcgtagagactgtgatgtgtaaaaatgacaagatcttgattgccagcaactggtatccggcatcactggtgaagaaaaaatttctgatgctgacctattcacatatcgagtatgtattacactgtatgagtggtaacaccacaaaggtgaagaacatcaagaaatatttattagcagctttgtttaatgcaccgtcaacgatgaacgggtattatcaggcagaggtgaaccatgatatgccaggactggtaagataggaggtgcacatgtttattttaaaacttgttgggaagatattattactgccggtatggctgatcctttttgtgatcggcttggcagtaaaaatgacagtacagacttatgcggttgtcagaggaatccttgggtttatattcactttattgatcatagcgactgcatactgttaccatgattgggtacaggttgcattcctgttttcgctgagtgttattctgtatctgatcctttttgcaggagtgttcgtagatactgtactggacatgacaagagaacgtattattgattttattatatcgtgaggagaatatgaaaatgagtgaaaacaatgattatattcagttaccaccactaaaaaaagacacaccatctgatgtggtagcatttatgtggaagtacatgaaagtaccggagaattcaagagaaaaagttaagaatctgcttaaagatgcaaatgaaaatggagtaaaattaagtcatcaggcaccaaccctgtatgatgttgtcccaaaaatggaaataaaatgaaggagaaaaggcggcagtttagaaaggctgttgccttttaggaattgttgtttatttgttgttttttataagctatactataaggaaaagataacattagagccagaggtgaaatttatgaactataaaattttaatggttgatgatgatagagaattgctaaaaatgctgaatcaatactttacattgaagaattatacggtaatgattgcagaaaatggcatagaagcaatggaaaagataagtgcaaatcccgatattattttattggacgtaaatatgccgggaatggacggaattgaagtgtgcagaagaatcagagatatggtttcctgtccgattatttttttgactgcaaaagtagaagaacaggatcgagtaatgggattgttgtctggtggtgatgattatgttttaaaaccattcagtttgaaagaattagatgctagaattattgcccatttgaaacgtgaagaacgtttacataggaaaaaagaacaaaggttttatggagaattagtgattgactatgccagtaaatgtgtacatattaaagggaatgctttagagcttacgaaattagagtatgagatcatagaatttttgtctatgaaccctgaaatggtatttgataaagaacgaatctatgagaagattggcggatatgatgcagaaggggacagccgggtggttacggagttgattcgcagaatccgcaagaaaatgaaaatgtattcggaacacgaatatattgcaacggtatgggggaggggatataaatgggcaaaataaaaaatctttcgttaaggaaaaccattgttttgtatatgataattagtttaataattagtttttatctttcagcactaattatgcgaatagcaagcacagtacaaaacaacatttggtggaattatgtagaccaagaagaatattttgaaatggctgaaggggatggtagaaggtatttgccagatgttccgagaccacattcttatgaaatgaaagaatttgattatcatgtatcggaaatatgtgattttcttcagacatttacagtgcttatcgtatctgttgcagggagtattatagcggtatttcttttttataagcataaactgaaatgccctatcgaagaattagaactggcttcccgacaagttggtcgaaataatttagatttccatatcacttatgaaaatgaagatgagatgggcggattgtgcaaagagtttgaacgaatgagaggacagctggcagagaataatcaacagttatggaaaatgcttgaggaagaaaaggctttgcgggctgccattgcacatgatatacgttctccgctctctgtgctggaggggtatcaggaaatgctttcagaatatcttccgaagaaagagataaatatggagcaagccttagaaatggtaaatgaaagcaaaaaacagattgaacgtatggatatctttgtggaaactatgcgaaagatgagcagtttagatacaagggagttagtagcagaagaaattaccagtaaacaggtagaaatagacgtacgggcagagatgaacgtgtttaggaaaaaatttggaaagctatatgaattagaatgttcggaaacagaagaaaaattttcaggagataaggaagtgattttagaggttatagaaaaccttttgtcaaatgcctttcgttacgccaagacaaaagtggaaatggaagtgtttcttacctgttctgaattacagatcagaataaaggatgatggagtgggatttacaatagataagcaaaaggcaacagagcttttttatcagcaaaatgtgaaagacagtttgaaacattcaggaatgggcatgtatatcagcagattgtattgtgaaaagcatggtggtcagttactgatagaaaatgaaaaacagagtggagctgtaataacagcagtatttcatcggattgcatgagcggtccgatttttttatgctgttgtctttttgttgtgatttatattttatgatgtctataacgaaggaaaggaggaatacgtatgattgctatttttaaaagagagattaggaattatctaaagcgaccgttattttgggtaggtgttctgcttgtgatttatggtgtgtttaatgcgacaagtccatatttaaccacacattatcttacaacgggggaggaaatcatcaatgatcagtccaacacttcggttgaaggagaagtgtatgagggctatattccagccacgcctgaaaagcacagagaggtatggcatgaaaaggtaaaaataaaattaacggatgtgtttggattgacggattcagaagcacagaatgtcattgaaaagctggaaagcatgaatttaaaagaggcctatgcgtatttggagcaggaatatgactggtacggggcaaggtatttatacgaggacagtacgtattataagggaacggcagaagaaatcaacgcatatctagataaaaaattggaagataagacattttctttttattacgcaagaaaatttgctgattttgcgggtctgtatatggtgttttttgcaattattatgttggcggttttatttttacaagatacaaaaaagcatacttatgaattgttgcatacaaagcctgtgactgccgggaagtatgtaatgggaaaagtgagtgcaggatttacaatttgtttgcttgtgctaactattttgaatatactgttttgggtattgtgccgcatctatacaaaggatagtggatttgaagtgcgactatgggattttgtggcttctacggtactttatatattgcctaatatgctgatgattgtgagtatatatacattgatttcactcatatttaaaaatccacttccgggtgtaccacttttgattctttatatggtgtattccaatttgggcggaactaatgcagagggagtttacggatattggggcaaacctttggcaatcatggtacgatttccggggcagctttttgatacgacaccgcccccgatggcgctcttaaatcaaagttttcttattattgtatcggtagtaattatactgatttcgatacagatttggaagcggaggcgaatataaatgaagaaggaaatgaagattgttctgccattttataaaattgcttatgcagtatcctttgttgtaattttaagtgtgattcgtgcagttgttttcacgtatgaaataggactatccatagagccgccttttgcgatattgactgctgttttttgtgcagatacttatgtgcaggaaattacaagcaaccgttccgaagttcagagactgtatcagataaaaaagagaatctattctattatacagagactgatgatacagggaacttttttgctgctgctcgctgttcttggatatggattgttttttgcgtttcagaaaccaattacacatccagtaacagaaagtgaaatacttcagtttattacctgttttggggcgattgtagtaactattttcttttggggaatattggctaatacattgtctatgctttttcgcaatatgtggatgggaattggaagcagtcttttgatatgggtagcaacaaattccacaggtggagataaactttttggagcatggaatctgttttcttattcttttagagatatagaaaatactgccgatattacatggctgtatgggaaaggcttgtgtatttgtatcggactgattttgttactggcattgccgaagatcgtaagaaagagagggtaaatttatgagtattcatattgaggatttaacggtaagatttaagaatagtgtcacagcaatcgaccatgcagatttagatataccaaatgggatatttggactattgggagaaaatggagcgggaaagacaactttgatgagagttttgaccactgtgcttaaacctacaaacggaatggttacattagacggaattttgtatagcgaaggaaactatgaaaaaatccaacgaaagatagggtatttaccacaggaaattgaactgtatcctaatttgacggttcaggagtgtttggagtatatgggagatctggcaggtgttccgaaagcagaatgtagaaagcggatagattattatttgaaaaagaccagtcttatagaacatcgtaagaagaaaatgaagcagttatcaggcggtatgaagcgacgggtaggattggtgcaggcgcttttaaatgaaccggaatttttaattgtggatgagccaactaccggtttagatccggaggaacgtattcgcatccgcaatttgttagtagatttttctgaaaacagaacggttttgttttcaactcatgtggtagaagacttagctgccacctgcaatcagcttgcaattatgcataaaggtcgatttctgtatgcgggttctatgaagaatttgacagaagaagcacaggggaaaatctggatttgcaaagtacctgatgagagaaaagcaagagaagtggaacagaagtatcgtattacatctaaacagtatgttgaggggggattgcagttaagagtgatttctgaaatacagccagaattggagtgtatgtcaattcctgcaacgttggaagatgcttatatttatgtgacgaatcaatacgagtagataaagcaccatctgatgctttactaccagttgcacgttgttcgctttgaatatttgtggagaaaaagtatgtattattttggctttctataaaacctataaaccagccatttatatcctgcccgttcactcgtccggttccggtttttccataaattctccattttcagaggcggtaagatggatggaatttttgacggcatgaatattagcaggagtaaagttgaagttgtttcgatataaatttttcaaaagttcaacttgttctactggtgaaatctttaaggatgactgcatccagtaggaagagaaatctccggatatatttttattgccatatcctatttgctgaaggtatgaatttatagtggaagatccgagctgcttgtcgattgattcaaaataccagtttgtatatatcttttaaaaggtatatgattaagaaaaacggcaggaggtatctgaatgaaatcacataaatattggtctatcggtgcactgattacaatgcttggaactttttatacaggttataagggatcaaaagaaggccataagtactttgcagcaagttctttgctttgcatgattatggctatttatacaggacacaagatgatttctggtaaaagtaggaagaaaaaagaagtttcagtagagagtgttgaagattaaaaaacaaaatattttaataaataacgccggtgcgggatttttgatatccagtactggcgttgtttattctacaggggcttgggggtgtagccaccaaatatactattcgttttctgcttcggcaagtttgttaaggatccactccctattgataactatttcatcatcatcgcggagatccttgaaatcattgcagtgtgaagaagcaaattcatacatattgtcaatgtcaactgcaccagtaatctcacccttattaatgattacaagaatatttgttccgtcgtcgtcgacagcaaagcgcagttcatcaaattctatatcgggatcatttttgagaatagaatctgtcgcaagtaatttaacaagttccattaccctgtcatctttacctgcatcaaagatctggatcttttcaacgagctgatttgctgatgtcacaatccggtataagtacttttcggtacgataatcagccaaagcatttttttcataaaatatttcatatgtcttctttacttctgattcaggaaccagataaatcatgacaagatcttccatctggtgatagagtgtggagtagtttaaacgaaaggtctctccacagctcggcaggtataaaggaaaatagattgattaagtaccttctctttcatttcaggatccagtgcagtattaatactgtcccagagctcaaaatctccctcatgatggcaggaaggacaagttaccttttctatatgatgtcttgacataaatgatcctcctttcagtgagataaatctatagtttttctattgtagaataatcttatccgctattatttcgccagaaaattactctgtatctccatcggcatatgataagcctggcctcgttttgtcaggctgtatagtttaaagctcatgagttccggagtcgcattcaaagagctgcagagtccgaaataatccaggtcttcgttctgaaccatatcttcaatctcttcatcatcaatcagaagatcggcagcaaacagattggcctggtattctgtattatccgtcatattgtagagggtatcatcttgcattggagccattttcagctgggaacgatgcaggatgatatgccctaattcatgggcggcaacgatcatcttttcttcttctgaaaggaaactgctgatcatgacatagattgtcttacagctcataaaacagtatcctttcagtgtcttatatctggaagtttccccgacaacaatgttcatctgatccatgatctcaaatggatctcgggttccatatttcttgattaatttctttgtttctgctcatatttgatttttgccatataaccagcaatgcaacatatgataataattataatagctgcaacaaatacgacaacttttttatgctttttaaatgcttccttcatagtttctgaatccccctacatattttataaatgtattgtaacatacacttattttttagatagaagaagtcatacaaagaatactactcttcttgttctgaaaataccgaaaacagaaagtagtgtacgtaaagtttttctaccaagaagtgttgccgaaatgctgcaaaaatggaaactgaaacaacttaatacaaaagcaatccttggagaggaatataatgattacaacttagtgatgacaagtgaatttggctctccattagaatccggaacaattcgagtatccttcaataaactaattgaagaacatcatctccccaaagttgtatttcacagtttgcgtcatagcagtgtcacctataaattaaagctcaataaaggtgatataaaagctgtgcagggcgattctggccattcccagacagatatggttacagatgtgtattcccatattattgatgaagacagaaaaaagaacgctgaattatttgaagatgcattttacaagaaaaataatcttgagccaaatatggtttctgaagaagtcgatatggaattattgatgaaagctctggcgaatccggaaatgcgggcgttgcttaattcgctggctaagacaatgaagtaatgaaaagtagtgagtctatctccatcatgcctatagaaattattcaataaaagcgagcaaaacatcaatacaattgtattgaatcagcaatgaaatggcattataatgaagaaaaaaggaggtttctaaaatggcaagtacaattcagatcagggtagacgatgacttaaaaaataaatcagatcagctttttaaagatcttggaactgatacgacatcagcaataaggatgtttttaacgcaggcggttgcatataatggatttccatttgaaataaaacgaactgtgcataatccttatacatctatgacagaagaagagatgcttcaaagactggaacaatccagagaatcttcaaaaaagggaaattaccgaaatgcagatgatgtgatttcagatatgagaggaaaatatggattataaagtagttgtaacagctgaagcagaagaagacttgaaccagtttatacagtatctgctttttgccaagaaaaataagcaggcagccaaaaatgtgcttgatgattttgaggatactattaaaaagttgaagtatgtagcgagtagtttgaatgtatgcgacaatccgcgtttacagagccttggatatcgtcgaataaattttcaacagcacagatactttatgttgtacagaatagaaaatgatgttgtatatgtggatgatattttccatgaattacaagattatgaaaaccgaatgatataaattgaatattggcagtaaaaagagtatttaccgtaaaaccgtaaatgctctttttttgcacctatttggaaagaataaataatatagcgtctataaggaagcgttggttttaatggaaatgcattattggaaaatcccctaatttcaaaaataaaaagtagtcgaaatttccatagacaaatacacgctcacgttgtatattataaatataaatctagtcaattaaatatagatatcatttccacctctaagggaatggtagtcataggattgatgtagttagtatcattacatacttccccaaatattagctgtagctaaaaagttgctaacaagctgtacttatctaaggtttatagctgattacagtaattgactggataaaaattggaaagccgtttttcataagaaaaatcgggctttttcatacagaaactatcaaacattgacagctccctgtataactcctaagactttattgtaggttcgattcctacagggaacgcttgataagaggcggaaatgattagctaattagcaaaatcgttatccgctttttctttttttcgaaaaataattgctttgaaaatcagctgtttctgctaacaaatccataaaaatgttagctgacagctaataaaaagcagtcatttgctaacaagaaaaatttacagtcctgctaacgaacgaatggcatgcccgttcagactagatttataaaaaattctagtttggacgggttttttgtcgtcctaagataaggaggtaaatcatgcagaaagtaaaagaaaaaagtaattggaaaggcgaaaccatagtagaaattgaaatagaaaccacagactgaggaatatgataatttgccagaattcgaaaacttcgccatggtagccgccaaaattgctggaatcaaaactgtgcctaaaatgtgttctctagaagacaaacttttatgtgcatgtgaagattcctatttgccggagaaatatatagaacagactaaacaactgatcacaacacgaatcgcagtactaaaggagggctgaaacacccctacatacaaaatggaagattctcctaattttgtatgtaagggtgtgctcaccgagcgcaccactgcaataaagccctcgtcatattttgtcaatcacgagtgatagactttgatttgaaattctcacattaggaatttttgtttaaccgccacagcgcagctgctagataaaaatcataggtggccggcataagggtgaaatcggtgtttgttatctgctttatcttattaagcctgtacgtcacagtatttctatgcaaaaacaaggtggctgcagtggtgctcaactgggagtcgcagtcgattaggtacactgcaagggtttccatcaggttgtcactgtcgtcctttaaggcttctattatggatttgatttgatcgtttcgattgcctctatttatagctagatttgtgatttcctgcgaaaatataacatcatacatgtcgcgaaattttcggtggatgaaaattttgctcattgctgctgaatttgcacaaaagtctgagtatattttcctcattgaagttagatttttgctagactccaagaaaaacaaggctccctcatactcgtttatgcatttttctatttccgtagctataatgccatcatccttttgggaaaccattatagaacttagaattacaagtctgtcgtcaataatatccttaacgtagaatctttcactttccttcaatatgccttcaatctgccgaagaatgtctgttaaattgtctttttccgattctactacaagaatagttgaaagcttagaaaaaggcacaccactagcttcaaggaatttttctcctattacgcgcgatgatttcaagatcaaagtaataacagtattataattctgcatatcgagggtgtagccccataaggttgagaagaaatttgtgcatgcacaaatttcatctagcttgtgttcactaatgctgttttcgttgcttgaagcatataatgtaagccaggtatttcctgcgtgggggaactcttttctatacaaataaaatgacttatcctgcaacattatgcttttacagaaaaagtccgttgagccatcagcgaaggcattaaaaaagaattctggaccaaattgtccaaaggacggcttatatatagatgtgaaatataaaccgtttttgttataaagcacaaggttacagttataagtttcagctattacatttagcagggtttccatgcttcttttattgtaaggaatctgcttcaatctattctccacagtgtctgaaaaggaatccgtagatgcctgatcgtagaaaacagcccccattacatctttaattacatcactataactaacactatattctgcttcgtcttcaataagaattaaaggtatgttcataacgtctgcagtctgcaacaactcgtcagacacctgagggatgacgtcacccacgtaaaacagcactagtgcaacgcctccagcatcatataagtttctcatttcctcgcattgtctagtaggatcatctttaattgaataaaatgacgtgactaacaactcattgggattgaatacactaattgcctctacagactttgcaggtatttctattacagatactgatgatactattctacccagtccattcttgcctgcaatcactctcgcagaatgaaaagagggtagtcttaaacaatcttgaacagtaacactcatggctcctcctagtataattttttcctttatgatatcaaaactcacagtcataaacaaggcttttgtgcaaaagcacaatatgattgataaataattctgtcatctgcataattatcatttataataatgtgtgctatcatagagaagattcaaaaggaggtacccattatgagtacaaatgaaaataaaggtaagaaagcagaagtcacagctctgcaggcgatttctgctgaagacagaaaagactggatttcgttagccttcgttcaggccggcatatgtgtatgcgttcctgcattcctattgggagcgttattaggcggagcaatgcctatatggccagcaattatttcagggtcactaggctacttaattgtagtagtaggtatggttgcaacgggaatgataggctgtgaccttggactagcatcctgcacatgctgtcaggccggctttggaaaaagcggagctagatttatcgtaagtacaatctttgctgttaacatgattggctggtttggaatccagaatggagtatgtggagaagccttcagtaacgcaatgctagctatgaccggatgggatattccagttgtagtttcaaacacaatttggggaatcataatgcttctgactgcagtatatggagtgcatgcgctagaaaaactagacaagatttctattccattactaatgatcattatgtgctacggaacattcctagcatttaaggtttacggaacaggaaaccttaacgatgaaggaactgtacaatctatgagcttcatgtcaggtgtagcactatcatttaacttcactgctgtaggtacaatcactggtcctgactatactagattccagaaaagcagaaaagacactgttaaatctgtattctacggtgtattcccaatgggtgtaataactctgattatgggaatcgttcttacaaagctatcaggacagtatgatatcagtatggttctaattgaagtaggacttccactcctgggcatcattgcacttgttatttcaacatggacaactaactcaacaaatgcttacagcgcaggtcttaacattgttatggcacttaagcttaaagataaccgaagaagagaagctactttaatttcaggaattgttggtattgtattatgcgacctgggtatcttgggacatattgagggagtgttaagcttactatcatacgttgtttgtcctgttggcggagtaattcttgctgactactgggttgtaggaaaaggtaaagctaagaactttagaccacaggacggtgtaaactgggctggtgtaattgcttgggcattaggtgcaattatttcttatacactagttaaaattgaattcgttggtatcattataggttttgttatctatcttattgcagagcgctttattccatctgcatcaagagataacgccgaaaatatagcataaattatcacaaaaaagaggagacagaaaaatgagagaattaaacaaacaggacatgatcgatctattgtacggatgtgcagtgcttggtaccggtggtggcggtccacttgctgacggtttggctcttttagaagaacatttcgaaaagggaaaaactctaaaattaatcactttagatgaacttccagatgacgagtatgttgttactccttatggttgcggtgctccatcagctaaacctgatcctagattagctcatctgaagcatagcgaaacagcttccgcagttttagctgtacaggctctagaggaatctttaggtaagaaaatgtatgcaattggctcaactgaattaggtggagaaaatacagctgaggctcttcacgttgcactgttaatggatttacctcttattgacgctgacccagccggacgttcagttcctgaactgcagcattctacatactatgtaaagaacgttcctattttccctatgggcgtagctacaaaatttggtgaaaaaattgtaattcagaatgtagcggatgacctaagagctgaagatatcgttagagctattgctgttgtaagtgacaaccttgtaggtgtagctgatcacgcaaacgttggtaaggttatcaagaattctctaattcctggtgcaattacttacgctcaggaaatcggtagagttcttagagaaacaaaggaagctggcggagatgttgcttctgctatctgtgatgataaagaaggtaaagtattattcagaggccacatttcagattacacttgtgaaacaagagatggcttcaactttggtgaaattcatctaaagggcgaaagaaattatacggacgaagcatatcgcatctggtttaagaacgaaaacatcatctcataccgcaatggcgaagttgatgtaattgctccagacctaatctgcatgattaacggagaaggaaatccaatgactacacctaattttgaagttggtgataagatgacagtaattgcacttccatcccctgaaatctggactactccagaaggtttggaatgcttcggacctaagcactttggatttgatgttgaatacaaaccatttgaaaaataattgaagatgtacaaaggccggttgtataataatatatgatcggcttttgttttagaaattattgcgaggaactatcgcgaagaagtaagggagtgataaaaatggaaaagatgattgatgatttacgttctataattaatatcaacagtgtgtgcgaaaaggacttgtccagcgcttatccttttggagaaggtgtacacatggccctaaataaagctctagaaatatgcaagagctacgggtttgagactaaaaattgcttttaagaagtccgatacttgcttcaacaatgtttctggcggaacagccataaatatggttcccgacagctgcactgcgtcatactctgttcatggagaaacaaagactctctctgtaacaggtaaggcggcccatggaagtactcctgaggacggagaaaacgccatttcaaagttgatgaatgaactgagtggagttgttacaaattgcaaacttattgagttcttccacgaatttattaagctagaatataacggcgaaagtcttggcggacaggtctcagatgaagcaagtggtccagcaagctacaacattggtaagattgaaactgttggcgatgatattgttctatacattgacttacgttatcctgtaaccttcaatctcgaagacattgtaaatgccattaatagtcatctttcagaaaatggtttcagtgatgttaaggtagaggttattacaaataaacctcatgtttatatggacaagaacggtgctgttatccaaactcttctttccgcttatcgcgatgaaaccggagacatgagcgaaccaacggtcatcggtggcggaacctatgcaagagcaatgaatggaattgttgccttcggccctatgctaccaggtagagaattgacagaacatcaggcaaatgaatatatctatttgtctgatttgatccttgctaaagaaatctataagactgcaattaaaagacttgtttcagaataataatcaggaaaaaaagtgctcatcattcctgtaaccataatctattcttttagcagatttgattttgttgctgaggctttcaaacatagagcgtcgtaatgatccctttttagagttttttcgatattatctatcagggggtatacgccgctctattttactatgaaaaaagcataatctttcgtcgcatcacgttcgctttgatacgttgccggtagcaccgcaattgttgccttataagatgcccctactattgatccactgttattaaccccgggataaaaaataatagaagaaggatatccaccattctcttgactatatacaacatgcgcagctgttgccacatcgttcggaccaaaaagccctcctgttccaaatgaacttgttccatcgggcctagtacaactcacaacaccataagagcaatatgggaaagttgtacttgataaactagcaggaattctatacctatcatcaccatcaataatcgctccatatgtttgaattccagtactgattccctctggaatgtatgagtcaactgaatcactattttgttcctcaatttctactgtcttcatctcattagtctttaaatcaaactctatcatttcacttgattcggctgcaaatgcaggtattccatgtaacaaaaagcatattcctataatagtagcacttaatttaaatttttgtttagctctgatttagttgcctccttcataaataacaacatcatctactgaatacaatagaatgggataatgtattttcattggagccatcttctgaattcggataataatatacttttacctcctcccctatctcatatttatccgcaaaatctccaaatggctttatccaatatacattctcaaattcgtcttttatagcaatattattgggataattaatttgtacaacatatcctgatatactttgtatttctgacaaatataaaatagtcaataatcctagtagtaaaattaaaattgaggttacttttataatatcttttttcacatattttcgtattttcatattgctccttcaatatttatatcttgatcttaaacttacgaaatcggatctactaattgaacatgctaaaaagacatactattccctaaatcactctgttcctcaaaaataatatgtcttatattcaccacatttttgattttatcatttttccattttatgcacaatattatcaacgattcatttatattttcagcaaaatttacaattctcacttggttattatatatatatcagacaactctttttcaaaaaagggcaatgagatttctcccacaccctttgtcatttcttatctatttacgattccgctccatctccatcccctgataccgcctcggcattggctttccctgtttctttgcaacctcacagcggtgtttatacaaacgcaaaaggacagatttcctcttctttggtacttctggattctcctttttcggtagcagattgttgattcttccatcgatcatattgtaattctgttcctctgccatttctgcagatcgaaggtattccccattgataaagtatttctgccataccgaaagccgttctttggtagctcccttctgtttttcctgttcattgaacttctggacagctgatttcatcctatcgatcgtatcctgatcaaagccatctttacactcatcaagaatcaccttcagccaaatccttttgagtcattccattgacttttcgtaaagcggcaataaaaccgccgatggttttcttttccatattgagtcctccttttggataggtggtttgctttctacgtctttattctaagattttagtagtgagaataccacccaatagactcagaatcactctcagaatccgagaattgaccgtttccaggcacaaacaactcaaatcgacttaaaattccaggctattcgaattcaacaagaaatacttcattcccatgatgacaaaaccttcatcatttctccaaggcttcttactgccatttacaatgacaatcttcttaaaagagtctgggatattacgcagagaattaaactcctgagtctgcttttcttccgaagtcatgtcataagcaacctgaatgtaatacctctggttgccttggttcaccacaaagtcaacctccagctgcttacgaacacgcttgccctctttatccttatcgaagatgttcacgacacccacatcaacattgtagccacggatcagcagctcgttataaacaatgttctccatgatatgagtaggctcctgctgtctgaaattcagacgggcatttctcagtcccagatcagtaaagtagtatttcagatttgcaccgatatactttctgcccttaatatcgtatcggattgccttggaaatcaaaaaggcatctgtcaaatggtcgatatgcttggagatggttttattagtataagtcatctggcgctcactggcaaaggtattggcaatctttgaagggttggtcggtgcgccgattgcagatgcaagcacatcaaccagaatcccaatctcatccacgttctgaatcttatttctttcgataacgtccttcagatagacatttgcaaagatgttcttcagatagtccgctttctgtcgttcgctctgaaaacttacactccccatttctgtacatctacacgtttttatgcaatgcgacaaaattaatttgataaaatttttaattatggtgtccaaaatcagcctgctatatcgttattatagttaagctgaaacaaggagccaaatcacactgatttgactcctttatatttaaaaaactcactaacgttaattgattatagttcactttcacaaaataggttacagatatcgcttactttgcattttcactttttattagaaaagaatagttataaacaagaaaatatcttgtacttacgataggaaataaaaaatatcaaaaaaataatgattaatggtaagcttgtgatagaatgaaaaaaagagaaaaacataaaggatgtagttggggagaatattggttatgattagaaagttgctgaacggagatattgatagagttgctgacatatggttaaagacaaatctgaaagcacattattttatttccaatcaatactggaaaagtaattatgaattagtgaaagaaatgatgtcacaatccgaagtctatgtgtttgaagcggataaaatgatacaaggatttataggattaaatgatgaatatattgaaggtatttttgtctctgatgaaatgcagtcatgtggcataggcaagcttttattggattatattaaggataaaaaaatcagcttacgattaaatgtataccagaaaaatgccagagcaatttctttttaccaaagagaagggttcattattcaatgtgaagatttagatgaagctactggtgaaaaagagtacaccatgctatggaaacaaaaatagaaatcgggatttaacgcttgaaaaaaggagaaataaacatggcaaagaaagaagaaagatttgaagttacattcagagacggaagttggcttaaagatgaaggaattcgtcaaatccttgtagataagaagactggggttaattacctttgttggaactccggatttggagccagtattacacctcttctggattcggaaggaaaagtcatagtcacaaagtaaaatcgggaattaaaggataaaactaatgaaaatcaaaaaggtaattataggagtcactatcggaataatcgcagcaatactttggagcgttgttttcataaactcattaaatagcatggctggaattggaatcggaatatgtctgggtatatcttttggcatatctggcagtcttattttttcaaaaaaagataaagataagtgatgatacaacttcaagtttgccgaaatatatttctaactttccctattttacaggctttccagcctgtgcattagcgaaacgatatgtattttcccttatttttgcccttatgagataatcgtaagggaaataagggaaagttttatttagtcattgcctgccactttatcaagtaaccttgcagattcccgcttggcttttcttgtagagtgtgcatagacattcatggtggtactgacatctgagtgccctaacagttcctgcacatcctttggtgctgctccatttgccagaaggttgcttgtgtaggtgtgtcgcaactggtgaaaatgaaatccttcaaatccatccagtttctgagcaatcttcctgcaaacaattcctaacgtgcttggcagttccaaacttccatccggtcttaagcagacaaaggatatttccttataatcttctggaacattctctgttccgtccagatgatagaactcatagtaaactctgtttttgtcttttacttctctgtagtagtttttatggtaaagttctccgtactgcattcggtttttaagttgttcctttcgggcattgcgaagaatctctgccagtgtatctccaaaatcaacaatccttaccttttttcgtttggttggtccgatgatattcttgtgccttgaaccatcatatcggatactgcgtctgattgtaaggcactgttcttcaagattcacgtcctgccatgccagaccacaggcttcaccgatacgaagtcctgcataataagctatctggattggaagtattgccggtggattgtaattctgtagaaattcaatcagtctttcataatcctctcgtggaattggctgtatatcgccatccatgtcatcatcggaaaacaggtcaacctcatccgtctggtatttcagcttaatatactgcatcggattgaaagtgatatattgctttggtgatactgcaaatcggaatgactgctgtaatactgccgagaaagaacgaatgtaatctttgctataaccttttctttctgaaccatctggataagtgccaccaaaggaaagcagattgaagaaggcttgtaaatgctcagatgttacatttttcaactttctctctgaaattggatgcttcttgatgttggtaatggcaccgaggtaattctggactgtcccattactgagcgtaccggtctttaattcttcctctgcccatatatcaagtaattctccaattgtaatattttccgactttgcaatgaatttcttgctttcgtaatcgtccattgcctgacggagcagtttttccgtttcacttttactttctgttccagcgtattctttctgaaccagattgccgcttgcatcttctacatagaagcggtagtaccatttctttcctttttttcttacagatccttttgccataatcgtgtgtctcctttcgatatcagacaatcggaactgatgaaatgcttcttgcgtgtaagtatatcataactccggttgtcgttctataccgaatcggaatcctcatacaaaacttctgataaaagattttcaagcctttgttctgccatttccggtttcttggaataaagccttacgatatctgccatgtcgttaaaggcattaacagtgtgggtgatctcccggagaaacataatctcgttatattcatcattcgattcaaaccccattacttttgcaatatcagcttcattcgtgttgcccttgtaattcttgcaggcaaactggaatgattccagaaacaggttatattgctttaacatcaacagcagtaaatctttggaaaaagcatcttcctttttactaaggtcgagaggtaactgtttgagaatatcgcccattgcatcacgaatctgtaattctttcttatccgtaatatcggtttcgtattcatcggtttcccctctgagccattcaatagatacatgaagtgcttccgaaagaccttccagcaccatctttttggtattgtcaatcgaaccattctcataacgcaggattgtggaagctgtaactcccatcttctctgcaacataaggctgtgtcagatttaattccagacgacgctgttttgccctgctgcctatcagcttgcgtagttctttatctttcatgctgattgcctcctttttcggtatgtatgaattatagcatgtacctcacataattgcaatatgcaatataataattatttttaaaatttcataacgcttgacaacacaatataaaaccgctatactaacagcacaacaaaaattgcataatgcaatttataaggaggtgacaagatgacggaaagaaagattgcattatccatcgaggaagcagccgactatacaggaattggcagaaacactttgagaaagctggttgaatggaagaagcttccggtattaaaggtcggaagaaaagtccttattaaaactgacattctggaaaagttcatggaagccaacgaggggcgtgatctgagggataaaggaaatgtaaaagctgtcacaagaaatgtggcaacttaaaaaggcggcttcctaagaaaccgccaaaggttctatcagaccgaagccatgatatacctacacgcaagaggattataccatgtgcttctcctgatatgcaaccgggaactgttgtttatcggaaaaagaaaggatgaagacgatatggcgaaatcaacaaagacttatgaagaaagaatacgtgcattagagaaaaaggaacaggaaagcattgaagctacaaaaaagctcattgcacagcggaaggaactggaaaagcgaaagaaagcagaggaaagtaaaaaacgaacccacaggctctgtcagattggtggcgcagtggaatcggttcttggctgtccgattgaggaggaagatttaccaaagttgataggcttcttaaaaaggcaggaaacaaacgggaagtttttctcaaaggcgatgcagaaagagccacttacagatatggaggaagtgtaatggcggagggagtggtttttccattcccttcattgcctttgaatgaagggcgcacttatggacaaccagaggtcgtccttataagtttgccacaagtggcaaccggtctgcgcttacgcttgccgggctcgttccgtcggcggggctttcagccagacctgctcatgccgcagggggcactcttgcgcagagggcgttccgacagcttcacttctgccaaaccagaagaagatgctgtcggaaatcaatgccggatacggcagaaagggggaattatatcatggcgatatttcactttacagtaaagattgtcgggcgcagtaaaggaaaatctgtcatatccgcatcggcatatcttaatggagatgtgatgaagaatgaggaaacaggcagaatcagttactatacttccaaaaaggaagtcgtctacaccagtctgatgatgtgcgaaaatgcacctcctgaatggctgcatgtaccggaagaaaatataaaaaggtttcaacagtctatccgttataaaagagcggatgataaagatgccgcactggaaaagtttaaaatcacatttcagaaacagcgtctatggaatgaggtattgaagatagaaaaaaatgcagatgcacagcttggacgctcatttgaattttccctgccgaaagaatggagcagacaggaacagattgattatacaaccgaatatattcaaaagactttcgtggataagggaatgtgtgtcgactggagcatacacgataagggcgatggaaacccacatgtgcatttacttgtaaccatgcgaccattcaatctggatcattcatggggcagcaaagaagtcaaggactgggattttgtcagagatactgacggaaatatcgtggttgatgaatcccacccggactggtggcaggataagaaaaatcctgatcggcatggaatccgcattccggtacttgatgaaaacggagtacagaaagtcggggcaagaaaccgaaaacaatggaaacgggttctgaccgatgctaccggctggaataatccaaagaattgtgagttatggcgaagcgaatgggctgggatgtgtaaccggcatttatccatagacaatcagattgaccaccgctcttatgaaagacagggcaaattaaaaatccctacgattcatgagggtgcggatgcaagaaagattgaggaaaaatatctcaccggacagatatggaatggttcatggaaggtagaggaaaaccagatgattaaaaaacaaaatgcactactgcaaaaggtaatcacaacctttggtaaggtatccggtgcattgtcaatatggaaggagtggttgaatgacattagaagaaagcaaagaagtaattcccatgatggaagcaatgattacacagatagaggaacagcagaatatcatggcagagatgcttcaggagatacaggaaaaggacgagaagctgatgtgctttcaggagcaggaagaacgattgcagcaattagagaaagaattgtcagagctgctacaaatcttaccggatacagaagaactgttgatgcttctggaagaaaagacagaccagatacagaaactcacagacgaaaatcagcaatggcaggaattggcacagaaattgaacagcgagaaccggctattgcagaaacagaacagcgaattactgaacttgaacagcaattagagaaaggaaggttgattgatgaacgaattaagaaactcaaagaacgacgatcaactggaagaactgctaatgctgacggagcagatgcaggaagaactcgaccagaaagaccggactatcaggaaactgaaagtgcagctcgacgaatcgctgaccttgaacgagaggttaaacagcgagaacagagcagggaacattcaagccttaaagaacgacttgaggaaaacaaaagaattattgcagagcgagaaagagaaaacgctcaccgcaaaggacatgatagaggaatgtcgcgataagctaagacaggcagaacaggaacgggactatgcactctcccatcagaaaaaagtagagataccggttgaaaagccggtactctatcaaaagtgtgggaattgtaaccagacagcttatctgagagcgaaggaaaggtatgatacgcagagagaaaaactggcaggcagatataaagcaaaaacagccatgtatgaagcattgatgtttttgctgatatggtattccgtatcgactactctttttcagataatactgtcaaaaatctttatttctgattgcgtggtattctttgatacaatcgcaacttttatacagagcattgcagggtggattatactgacaggaaagaatgtggcacagattagtaatggaatatccaatcctgtcattaccggaattatatactggctgataagattattgatttgcggtggctgtctggtgggtgcagaaatacttttagcattcaccgggataaagattgccgggctatataagaaatactgctgggatatgattacaatactggtaacacttataagcatggcaatagcaatctattttggagattggataaagacagtattgccgatcaatctgctatttttcttattattcgtgcaactggtatatgttggaatcaggtggtatgtaaaaggctggcgggaaacaaggggatattattaaaaatccgattgtaaacacacaattttatatatgtgcttaatcacacctctttgtattttaataaaatcctacaaaagctttgaaaacaaaggattcattgtaatgtgttcgctttatccctttatatgatttcacactatgttccccttgccctgactgttcataatggtaaaagcaagggctggaaaaacgcataacgcaatacaacaaagtgtagcaattgggatattatgaacgaagaaatcatcttttcataagcagtcaataaggctgaaggaattaatctctgccgccttattgactttcaggtgggcttcaattataattaaatcagctgatttaaaacaagcgatttagtaaaaggagagataaagtatgccaccaaaagccaaatttacaaaagcagaaattattgaagccgcattaaatattgtcagggcagacggatatgaggctttgacttcaagagcgttaggaacatatctcggtagttcggcaagacccatttttactgtatttaaaaatatggaggaggttcagcaggatatgattaaatctgctaaagctctgtataaagaatatgtcaataaaggactaacaacagagcctccgtttaaaggggtgggtacacaatatattctcttcgctgttaatgagcctaagctttttcaactcctctttatgacggagcaaaaacaaattcctgacttatctggtgtacttccgctgatagatgaaagttatgagcaaattctattgtcaattcaagatgattacaaaatttgcaaggcagctgggaaaaaactgtatcatcatctttggatatatacacacggaattgcaacgctttgtgccacaaaaatgtgccgatttacagacgaagaaatcagtacaatgattactgaggtatgtatgagtattttgaaaaagctgaaggaaggagaaaataatgattaaagcgagaaatataataaaatcctaccaaaacggagaaagccgattccaagtattaaaggacatcagtcttgatattgaggataatgattttgtggttattctcggcgcatctggttctggcaagtcaacctttttgaatgtaatttcaggtcttgaacgccctgacagcggtaaagtgttttatgacggaaaggatattacagcactttctgataatgaattaacttcatttcgtaaggaaaatgtcggatttatttttcagcagtattatttgctacccaatatgagcgttgataaaaatgtaaaaatgggtgctgatttagcaaataataaagattataaaaacgtcattagagcggttggactcggagaaaaactacataaatatcccagcgaactttcgggtggcgaacagcaaagagtatctattgcaagagctttggcaaaaagaccgagagtattatttcttgacgaaccgacaggagcattagacgaacaaacaggacgacaggttcttgattatatatgtaaacttcaaaaggaatatggttttacgattgtaatggtaacgcacaatttgaatattgcggaaatggcaaacacagttataaaaatgaatagcggaaaaatatctgaaatttacacaaatgaagcacaaaagactgcttatgagatagggtggtgatggtatgctcgttggaataaaaaatgtttcaaaactcatcggtatttccattatagcctgttgtgctgttcttgtttgtacaatgtttctgaacttttattttgatattcgattaattgagagtgaaattacatctgaattatcaatgtttttttataatgctcaggtttctaccgcaaaagtcgtttgccttgtaagtggcggatgcttgcttttaactgcgattgttatgttgttgttttatattaagcattatattgacacgcataagaaggaacttgggatattaaaggcgttgggatattcaaatatcaaaattgcaaaaagcttttgggtattcggaattagtatatttattggaactgtaaccggatatgcaggagcatttcttataatgccgtggttttacgctctacaaaatgaagataaaatgcttcctgagataactatcaattttcatccaagcattttattttattttgtggtattgccgactgtgtgtttttcggcactttcagtttattatgcctggtacaaattcaaaaaacctgtgttgctgcttttgaaagataatatgcaaactgcttctaaaacaccaaatcatagaatcgaaaaaagcagtgaattgtcgtttgtagagtatttgaaaaggaataccttgaaatctaaaaaggcacttgtattcttcattatttttgcttcgttttgcttttcagctatgacacaaatgtcgtttagtatgaaagatttatcaagtgaaatgatgggtgtgatgatgttggtcatcggacttgtattagcgtttacaactctgtttcttgctataactacagtaataaacggaaatacaaaaactattgctatgatgagagtattcggctattcacagaaagaatgttgcagggcaattttaggaggatacagaccgctgtcctatattggttttataatcggaacagtatatcagtatggattgcttcggcttatggtggatattgtatttaaggatgtcgagggtgtacctatgtataaatttgactttcctactatgcttatttctcttgcttgttttatcacgatttatgaaattatgatgtatatatattctgaaaaaattaagaagatttctatcaaggaaattatgattgagtaacaggggaaaatacatacaaacaaaatggatacaatgccctgtctggtgcaataaaaactgaacaatgatactggaaaataccaaatttaaaagtttcatctgcattgtcagaagtgaaaaaatatagaataatagggacaaataaatctaaaagggttatttgtcccttatttatctttgaattaaatttctaaggaatcttccgcatctacccacatttgcatcgttccatcaagatacaatcttgcatattcaagtggttcatcaatagcaagtgcatttaacgcacaatctgatccaggtgttgtttttaaattcttttctgcttcccagcagtcaatgcggagcatatagccagcactggtatatacatcaatgctgtttctgtgtggattgtattctgcaaatatcgttctcatcgtatcaaatctccttatcgttcaatcaatcatttgttaaaaaaatagaagcatttcaatcagttcaccatgtcgttttaattttgtgttatactgttttataggattttcttgcccttgtatttgcccttatcagagttcgtaaacactggtgggacaatataatacaagggaaacaataagggaaagctcacctgcgataaacttagtgttttcaagggcttgagagatatttgataataaaatataacaattattaaattccttggaatacatgaaatctcaattccagttggcggggttgacaatttatgattatatcaaagtaagataattacaatcaataacgccggtgcgagattttgatatccagtaccggcgttatcgattccatagagacttgaaagtgcagcctgcttcatatccgtattaggcatcatatgccaaagaactttttctttttttctcaatgcagataccatctgatagatacaaaaagcatggaagtacaaacagcactgcaatcatggaaaaaaccgttcctcttcccagaaaatagccaagctgtgacaacagtctatgggtagaaaaaacttcaaacaatggtcagtaccaatataattggaagtatgagagatttcattgtaaacaacaatactataaaaactgcgccaattgccagcagatttactttcatcatatctgccgtgatggtagggggcaaatgcgatggcgttgaccttagacatatcaaccataacgctctcatcggcagcgaccgaagtcataagctggctgatctttcttgcatgaactgggcatatggacacgcacctcatacaggagatacatttgcttttgtcggtttctgaagaagtcgatatggaattaatcatcaatgtcgtatttattttccagtgcttcttctgctaattccagttcatcttccagtttttcaatcgtgcgttctctcgctttgtatgtctcgaagctaatctctttcatctggtaagcatactcaaattcatcgtcaagcttatccagttcgtcatcgactgcgtctacctgttttttcaaagcgtagaattgttcgtgattctcagatgcatttgtagatgtttttgcattgtttacactttttgttatattacggatatcgttttcataagaagagaaatcataatccttttcgttcgcattctctactgcgttttctgtgttactgatattatcatcattgtcatctgtatttgatgttaccacttcctgtgtcttaatttctatatcttctgtcgctccattattggatgaagtgcatcctgtaaaagcaaatattaatgtgagagataataaaactactaatagttttttcataacatgttctccttccgtctcttggatgttttgtttttgctgttatatgtatcatatagggggaagattaaaaaaagattaaaacaaatagtaatttcaaaaaatgaaaaaaaggactctagcacacgaaaatgattggtattataataattacattatgagattactgattgtagaagacgagaatgatttaagaaacattgtcaaaaaaaggcttgtcaaggaacattacagtgtagatgcctgtggggatggtctggaagcgatggcttatatcgatatgacttcctacgatggtattattcttgatatcatgttgccgggaaaggatggatatgaaatcttaagagaattaaggcaacgagaagatgatacaccggttctgttactgacagcaaaagacagcattgaagaccgtgtcagaggactggatcttggtgccgatgattacctgatcaaaccatttgcatttgaagaactgcttgcaagaatccgtgtcatgatgcgtagaaagccacaatttacatccaatcaactaaaaatagcagatcttattctggatcgtgacacaagaaaggttacaagagccggaaatgaaattgatctttctgcaaaagaatttatggttctggaatgtcttatgcgcaataaaaatatcgtaatgacaagacagcagattgaacagaatgcgtgggactttgattttgaaggtggttccaatgtgattgacgtatacattcgctatttgcgaaaaaaaatcgatgcacaatacgaacaaaaacttatccacactgttcgcggtgtcggatatgtaatgagggaaaacgaatgaaacagctgacgatcaagaaaaaaattacgctatggtacaccggaatcattgccgtagttcttgggactattttagttctcgtccttctttttgtggataaggttggaatttctgcgacagaagaagaaatcagtgccgcagtgactggtttctcttcaaatattaattttcaggatgattccttttatcttgacggcgataccgaattttacgatgacggtattatgttttgtatttatgacaaaaacggacgcttactttatggaacgattccaacccaatttccagaagaaactatcctcaagtcgaatacaccgcgaatgataaccggatcaaatcgaaaatggatgatatatgacagcgtttacacttacggtgatgatgaggaaatgtgggtacgaggaattacctccgtacattctatagaacttttcatgcagacatccgagaaaatgctgttgattgtattcccattactcattattctgatcggggccatcggatattttatgatcaagcgggcattgaaacaggtggatcttatctgcgatgaagttgaaaacatcagcaatggaaaagatctttccaaacgattgtctctgccaaaagcaaaagatgaattatacgaattgtcggagaaatttaacgaaatgtttgagcgcttggaattttcgtttgagaaggaacgtcaattcacatcagacgtatcccatgaactgcggactcccattgctgttgtcatttcccagtgtgagtacttattggaaaatgaaaacttatctgcggaagataaggaagagattgcagtcatcttaaggcaggcaaaacgaatgtcaaagctgacaagcgaaatgttaatgatcgccagaaacgaacaggatgagcagcatctgatggaaaaactggattttggattattaagcgaacttgtaatagaagaactgcagacaaaagcacaggaaaaaaatattgagatcaccctgcaaaagcaggacaacttatttatgaacggcgaccagacattgcttttgcgtatgatgatgaatttaataaccaatgccatcaattacggaaaaacaaatggacatattcatgttatcctgaaggtcgaaaatgaccagattgtcggtgaagtgaaagatgatggtattggaataagtgaggaacacctggacaaaatctgggagcgtttctatcgcatagacaaaagccgttccagagaaaatggtggtaccggtctcggtctttctatggtgcgctggattgtaaacctccacaatggaaccattcacgtcgaaagtatcgaagatatcggaacgagttttattttccgatttccgaaaatataaggaactatcgctatatatccttttggtatattttccttattctatcacagtatcgtattattcttccatccgttttcaaaccaagtactaaaatgtaaaaaaacttgcaaatccatcttctttccgttaatatattgacagcaaacagagaaaggaaagaaggtatgtttcaaacaattattggtgcaatcagttcttttatgtacagcaagctgctggtcattctactgattggtgcgggagtctattttacaatccgcacaagatttccgcaggtaagattatttaagaatgcttgtggatccgtgatggaaaaaccggaggataaaggggcaatttcctcttttcaggcacttatggtttcaacagcatcccgtgtgggaacgggaaatattgtcggggtttcatcggcgatttgtataggtggatttggttctgtattctggatgtgggtgattgcgatcatcggaagtgcatctgcactgatcgagagtacattggcacagatttataagaaaaaaggaaaagacggaagctgttatggaggaccggcttactatattgaagcggcacttcattgtcgcccgctggcaattgttttctgcgttgcaatgattttaacctacgcatttggatttaatatgctggcatcttataatctgcagtctacattttcagtattttctttttatgatgcaaagatgagtccctggatcatcggtgggattttggcagtgctgacaggatggtgtctgcttggcggcggatcacgtatcgtaaaagtaacttcaatggttgtgccggtaatggggattgcgtatatcggaatttcacttttggtagtaattatcaatattcagaacgtgccggcaatgttcgtgcgtatttttgaagaagcatttgatttcaaagcaattttcggagcattttccggttcagccatgatgcagggaatccgccggggactctattccaatgaggcaggtatcggttccgctccgaatgcatcggcttcggcaaatgtcagccatccggtaaaacaggggctagtacagatgttatccgtatttattgatactttgttgctttgtacagcaacagcaatgatgtgtatgtcatccgggatcgatccggcaaaagaattgcagggagcaccgtgggtgcaggcatctcttcaggaatcacttggttctttcgggccgatctttattacagttgcaatggtattttttgcatttacaactctgctcggaaactgtttctattgtgacaatcttttaatctacattcacaaaaaacagccggaaaaagcttttatgaaaggcttcagactggtatcggcacttgcaatctttctgggcgcaggaatggagatgtctcttttgtgggatctttccgatgtactgatgggggttatggcgctcattaacattccggttatcctgattttatcagggattgcatttaaagcgatccaagattatgaagtgcagttaaaacagggaatcaacccggtttttaaaagtgcagacatcggtcttcgtcaaaaaacagatttctggagataaaacaggataatgggggagactgtccgaaccatcggataatctcccccaatttctacatcctctattttataactaagactttctgtgttttaatggatagctttttactttttgttactgtggtattttttatagaaataaatataggatattccacctggaatactgatccagataagcattgtcacaacagacacaatctcaaaatcagaaattgttaatgcacaggctatatacagcaataccatcggaaatgaaataaatcctaaaattctatgtgcaatcttccaggtatcttcatcacgcacagtccatggcaaacgaaggccggtatgtctgttatatggcaacttcggcgatacaatacctataaaaaccattatgcaagacaataataccatagcaaatagtttctctccattttccgaaaaagtaatgacatcaactgcactcagaaaagcaaaaacaataccaatgattaaaatgctaatattgcaaagtgtggtaacacggaaaataccaattcttaaatcgtcagttgttagacttgtaaacaaagccaaattacgatacagtacgatagctgcaatcagcatacatattcctgccattagaattgatacgacttcatttttcacactcattgtaatcatcatagataaaaatgaaacaaacagaatcagacctcttttctggtttgcctgatacaacaacttttctttttgcttttttcttgccagctgttcatttagttccgccaattcttccgccaaattcccattactatggatactctcctcaattccaagcaattgactaaccgatacatcaagcaaatttgccatttcaatcaaaacatctgcatccggaatagataatcccttttcccattttgaaactgtctgccgaacaacatttaactttactgccatttcttcctggctcattccccttgtttttcggaaatgctttatattctcattaatcataatttcatatcccttctattcgatatgtacatgtacattataaattatacgaatatgctgtttccgatacaagcaatggaaattaacattggctattttttctttgcacttaaaagttaatttgtgaatacccgataattctcttccttatcgtaatccttgtggattccatcatcctcatacatcgtataactgctgtttttatatccgataagctgcagatgttcggtatcaatatctttcacacactctgccacttctgcaaccgggatgcatttaccacttcgaatgaagagcggtacttcatttagtgccacatctacataatgaataccttttgcgagaacctcttcagaaatgcttccgtccggcaggaacttgataaatttcatttcttccggcagataaacataacggcctcttgcgttctgctcgtagaccggagcgatcatgatctcgtttccaagcatcagctgatcctctatcctgattgctctcttgtcatccggataaacaaacccaagtggtttgaaatacatgtcatcattcagcacagctttcatgtactcactgtacagatacggcacaagacgatatcttgtattaatgacagcgcggaaatcctcgattttttcaaattgataacattcctgctctcttgttcccgttgctgaatgattacgcatcagtggtgtgaatacaccaagtgcaagaaaacgaagcaacagttctcttgtcgtatcactgccaaatcctccaaggtcagcacctgtatacaggaaaccgcacatattcagagacggcagcatcttcaggttaagaaggatatgcgaccaccaggatttattatcgcctgtccagattccgccataacggtgcattccgatataagaagatctggaaaacatcagaaaacgtttttccgggtcaatgcgttcaaaagcttctcctgctgctcttgtcatattgtagccaaaaagattatgtactttgtcatgacggatctttttgccatcgacattgtgataaaatcttttgtaatcttccggattatttgcaatactgagcatcttgtcctgcatttcccagggatgggtcttgccttcggtatcctttgcaaactttccggcaagttctcttgcctctgcaaggccttcggaagaataaaagatcgcaggctcattcatatcattccagaaaccttctattccctgttcaatcagaaaacgatatttgtccccgaaccattttctggcttccggattcagcatatccggaaaatgggtatctcccggccatacagctgcaacaaaatcacttccgtcttctctcttgcagaaatagttgtttttgacaccttcctcgtaaatctcatatcccggctcaaccttcacaccggcatcaatgatcggaatcaggcgaatatcctggtcatccatttcctgcacaaattctggaaaatccgggaaattttcttcattcactgtgaaatctttgaatgactgcatatagtcaatatccatgtaaatcatgtcgattgggatatgattctcccgatatccttttgcaacagtacggaaatcttctttcgtcgtatacccccagcggctctgtccgaaaccaaaagcaaacttcggcgggatatagctgcgtccaattacgtggcggaactgttttacgatatcataagcattctcaccttcaagcacatagatatccagatcggcattttcgcaggataccctgagtgtatcctctctgtcatatccgatatcaaaggtcagtttcgacggatagtcaaaaaacaatccaaacgtagtctttccactcacaataataaagttgtgggctccgtacaaagaacgcttgtcctctgtgtgtaccggatcatctgtgcaattactgatataacaataccctctcttgttgattccacgattggcttcacccagaccatagacaatgtcatcttcatccatgatataagtaaaaacaaatccttccttctgactgacctctccatatgggagaacgccctcagttgtttcaattttttcagtcagtgcctccgtattaaatggagttccatatctatattttctaatcatttctctgtcacctggtgtttataatataatacaaatgcttcatatgggttcagaataatttttccgtcgaattcttttcttccaaggtttgtgatcagacactctgcgcctttaaattcttccggcacttctacttctgcattcttgtcgctaaagttgcagacggtcagaagtttttcctgatccccttttcttgtgtaagcaaaaatctgctcgtcttcacgataaagcggttcaaattcgccataaacaataatttctttctccttgcgcaagctgatcagtttctgatagtaatggaaaacagaatccggatcttcaagctgctgtgctgcattgatctttttgtagttttggtttactttgatccacggctcaccatctgtgaatccagcctgtttgctgtcatcccactgcatcggagttctcgcattgtcacggcttctcagcatcagacatttcatcatgtgttccggagtcataagacctgattccgtaaactcttcaaagtaattaatactttcaatatcacggtaatcttccagtttgtcaaaataaacatttgtcataccaagctcttccccctggtatacatatggcgttccctgcatcatgtgaatacaggtagccagcatttttgcggatgtttctctgtataccggattgtcatttccaaaacggctgacgcttctcggttgatcatgattacctaaaaacaaactgttccatgctttaccctggagtttctcctgccatttgatcatgatgtttttaaactctttaaaatcatatttttgagttgtccactttccataatctccgcatccactctccacatgctcaaattggaataccatattcagttcatttctgtcttcacccgcatatttctgtgcttcttcaattgtaactccagctgtttcaccaactgtcatgatatcatattttgaaaggacttcatgattcatttcctgaagaaattcatggactcttggaccatgggaccatgtacgctatatggtccaaaatcgccataaagtccgttattcatttctccatccggaaatctctgatctttggaaatcatactgataacatccatacggaaaccatcaattcctttttcacaccagaatttcatcatatcgtaaacttcctggcgtactttttcattttcccaattgagatccggctgtttttttgaaaacagatgcagataatacatctgtgtctgcggatcatattcccatgcagaaccgccgaatgctcctccccagttattaggttcttttccgtttaccgggtctttccagatataataatcacgatatggattatcttttgacttgcggctttcaataaaccagttatgttcatccgatgtatgattgactacaagatccatcagaatcctgatggatcttttgtgtgcttcacacaacaattcctcataatcctccatagttccatattcttcataaattctacggtaatcagaaatatcataaccattatcgtcctgaggtgattccagcatcggagaaatccataacacatttaccccaagttctttaaggtaatcgagtttctgtatgattcctctgatatctcccacgccgtcaccgttactgtctttaaaactcttaggatatatctgatatactacactttctttccaccattttttctccatgccaagtctcctcatttctaattatttgaccgctcctgcaaccacaccattcattatactcacctcatccttgcagtatcaagaggtttctcgcaaaaccacaaaaggtaacaaagtttatttcctgcttttatacagtttatacaaagaaaaacaggttattgcacctgctcgcatatatatgtaaaaaaagaatcctgtcattctttgacagaatccctctttaccagatagactgggttttttatatttaattcgttcagcgtctctccctgaatcaatttcatcagacgttccaacgccacatgtgctttttgtggaatatcctgatgaactgttgtcagtttcggtcgaatcatgctcgcgtaaacactgtcatcatatcctgtaacagaaatctgctccggaaccatgattccttcgtcaaaaaagaaatttattgcttctatcgcattataatctgaagaaaaggccagcgcttttgcttcaagaaagcgtggaagaagttctctgtatttcctgagacgaagatttcttttacccggaataactatatatctggaacgactgcagaatcccccttgtttttccatcgcctgtttgaatcccatccaccgatagtaatcgctgtcctgctctgtttctgcaacaaacaatgctttcttatatccacaggaatacaggtattctccgatctgatacccgcctgaataatcatctataccaacattctggaatgtataagtccccttcggataagcatcgatcaaaatcatttttttgtttaatctgtgcgaaaggttatgatactgctcttcattgtatcccaggataatcaatccctctacattccattttgaggcaatatccactacattctgaatgctttcaccgccaataagcataacataatatccattttcttccatttccatctgaatcgttccaatcagttctcccacgaatggatcctgaagtgactgcataccatgagcgtaagtaaatccaagtactacgcctataattctggaaccatgaccggaaagcatcatggaacccatattcggaacatagttctgttctttaagaatagccgtgattttatcgatcgttttctgggaaactcttttcgtattgccatttataacattggataccgtggtgcggctgacgcctgccatatctgcaatatcctgaagccgaatcataaaaccttcctcctgtattcttatttccttacaatactgtttcctgcttatttgtactcagatactttcgtttctgcaaaagtcattttcgcttatatcaaatttataatatcataggcagttaggtttgtcacataaaggtttgcaatttcaaactgcaagaccgctgtaattgcgactgataaaattaaccattgtctccatgaatatattagagatataatataaatactggtatctgatttttctgaatactaagtatctaaaaatggggaatgataaatgaacaaacaagagaaacagattttcacatccgacaagttgaaagaaacagccatcatgacgatagcagtgggcattatcgccgcggccgtatatttctttttgattccgagtatgacctcgatcagcagtatatccgcgctggcaattgttatgtcgcattatataccgttgcatgtgtcaacgatcacaatgatattgaacgttgtcctactgctgataggctttgtgacatgcggaaaggagttcggagcaaagacggtttacaccagcatcctgctgccgttgtatcttgcagtatttgaacacatatttccggattttacctcgctgacaaacagcagtgaactggatgtaatatgctatatcctggtcgtaagtatcggcctcagtattttatttaacatgaatgcatcttccggcggactggatatcgtagcgaagatcatgaataaatatctgcacatagaattaggaaaagcaatgtccatctcgggcatgtgtgtggcactttcttccgctctgatctatgacaagaaagctgtcgttttaagtgtgcttggaacttattttaatggtattgtgctggatcattttatctttggccagaatctgaaacggcgtgtatgtattattacaaaatacgaagaagaagtccgtcagtttatcttgcatgaactgcatagcggagcaacattctacgaggcgacaggcgcatataatatgcagaagcacagagagatcattacgatcgtggacaaaagtgaatatcagaaactgatgaattatattatcaagaaggatccggaagcattcgtgacagtgtatacagtgtctgatatgagataccgtccaaaggtaagatccttttaggcgggaagaagctctacagaacactttacgcagctgcttgaatatctgaacagaaaagagtcgcagcctgttccatcagggaacaactgtgactctttttattttgtcttccatttttgtgacattacttcacaatatccaactgcccgacaattccgatatatccatctgtttttattgatgaccataatgtgtgcagtttcagatcacacatctgcctttcacctcttacttttaacattacttttattgaaacttctttgtttttacttgatactgaatccagcgaatcttttacgcgctgaatatcctcttcgcttatatcatatactccatatgaatcaaatcccggaagatctctctgatactctttctgcgattctccgtctgttaaaaccagttttcctgaaatcgcattatactccattgaaatcttaccgctattctccttaaagaactttattttttcctgcatgatctctataacacgctgggaataatccttgcatggcaatgcattttgcctcagtatttcttctgagatcctctgcgcttcataatactctctgttgtcatccttttctttcttaaatgttctggacaactgaggactgctctctttcaggcattccagaagaagcggattaaactgtccgcactgaccttccagaatcatctggattgccgtatcatgatcatatgcattcttatagcaccgtacacttgtaagcgcatcatacacatcagcaattgacacgatctgcgcagagattggtatttcttccccttttagtccatccggatatcctcttccgtcccatcgttcatggtgccaccggcagatttcccatgcagtgcgtaccagtggcttgtcctgtggaaaatccatattccggatcatagacgctccaatctcactgtggcttttcatgatcttgaattcttcatctgtcagtctgcctggtttattgaggatttcttccggaatgctgacctttccaatgtcatgaagggaagatgctgttatgatcagagcaatctccgcttctgtcagatgatacgcatctgttttcctgatcaattctctcaacagcatctccgttgcgacacggatgtgtaatatatgttcgctgctttcactgttatgagaacctaatacattgctcaggattccaatcataatcgtgttgttttcttctttctgatagacctgatctacaaccacattgatcagtcgtttttggtttgcataaagtcccaatgtattctggactcttttctttacgataactgcatcaaacggtcggctgatatagtctgtgatccccagatcatacgcttttcgcataatttcgacagattcttctgatgaaatcatgacaaccgggacttcatcaatccactgtaactccctcatatgttccaacacctggaatccattcatctgcggcatattgatatccagaagcatcaggtcgatctccggatgcacttccagaatctggattgcctgagttccattttcagcttccagataatcataactgctgccaaggatctcctttaatatatctctgttaagttctgaatcatctacaataagtagtttttgtttctcgctcatcctttatcctcacgatttttattttttcctgctaattcagcaataatctccactaatagtttcatatcgatcggcattcccagaccggtaccgccaaacttagatgctccgcctttctgctcctgcgcaaatagctcaaacagatgtttttggaattcctcactcataccaattcctgtatcctgacatgtgaactcaaaagtcacaattccatcctgatcggaaggaatctctctggcactcaaataaatcttcccataatctttattatactttacggcattactcaagatattcatcagaagacgcttcagatggattgggctgcctataagatctttatgaatgatctctggtgttttatgttccaccttgatttctctttcatcagcctttttcgctgcttccagaaggcttttttgatacttctgttctttttccttttctattatgagaatgtttttctgtgattttctgtaaatcatccagattagtgctacaacaatcagataaatgaacaggcacatgatcacattttgcagaagtgtctgaaatatgatcgaatccggaacgtaagcatagatgtaatggtctctctgcttcagcataacaccgtgacaccgaactccattgatcgttaagcccatcatgtgcctactgtctgcatgattttttagcttttggattacttcataatcgattgtgctttgtccaatcagcccggtattgtttgaagcaatgatcacgccttcatctgctacgataattgtcccatcccggtccttccgatagccattcaacaaactctgtatcgtaagcgtataattcgttgcatactctgcagaagtataataataagtcactacaactcccggtgcatcctttcttgtgcaggcagccatatcaatataagccccgtcattatgattgattctcttagcatacactttttcatcgtaaattgctgtatccagtacgatttctttctctgcacattcttttatttccggcaataaactttcgttcgtactgtattcacatactatagttccatctgtatccagaaccacgattcccgtcagccataactgctctgcactttctttcaatagctgatcatccagtgttttttcattctctgtttctgcggctatatttttgctgacctgccgggttccctcaatggcacgaagcagacttttggattctgatgattcattataatgtgtatatgtggaacattgtacttttacataatttaccgtgtctaaaagattagcctctttcttttctttgtctgcattgctgaaaaaacatacagacagcacgacaagacatatcccaacagctatactgatgatccagaattttttttctgttgggacagattttttattcttcttcaagctggtccacctccagatatttttctgggtcatcaagatattttcctatgatttttgcagaagttccgtcctctctcatttcatccagagtctgctccagtttctccggcagatcccgagtttcattttttgagaaagcgactccgattccgactgtcataagtggttcatccagaattcggaatttcgcatcataatctttcatatactgtataaccgattcctcatgtgcacctattgcatctgcatatccctttccaaggaatgtatagatcagttccctgtgttccaggctaatcagattaccaagctttggaatcctgctgtctgttcttttcagaaaaattccttccggttttgttgtagattgtacggcaagtgtctttccttccagatcactcagggtatagatatcactgttctcattgactgcaaccacctggttactgaccatatacggaccggcccatttataatcatccaatcgtcctttcatggagaagcagcccataatattcacacgttgtgcgaccaacaacgcatattgcgcaaccatattgacattcctttcacagggtgtcataatacttgcggagatagtatttggaatactacaaaactatactctgactgaatcacaacaatttcatattgaacagttaccccgccggaaatggcggaaagcgagcttatatttatttaagacataaaataagactcagggaatacgaagaatagcaaaagcatttgcagggaccagtatgccttgacgaatgctttttttgtaaggagaccaataagaaatgacagttgagatgttaaaaggaaagattcatcgtgctacagtagtacaggccgaacttgactatgttggaagtattactgttgatgaagacctgctggaagcggcaggaattatggaatatgagaaagttcagatcgtggacgtaaataacggaagccgatttgaaacttatacgatctgcggcaagcgcggaagcggaatgatctgcttaaatggtgctgcggcaagatgcgtaagtactggtgacaaaattattatcatgtgttatgcacattatgattctgaagaagccaaagaacataaaccacaggttgtttttgtagatgatgagaataagatcagccgtgttacaaactatgagaaacacggattgctgaaagatatggcataactgcaaaagtgattgtaacctataaatgaaaatgaaatttgttgaattcagaacaagaggctatctcctaatttagttttaaaaggagaacaccatgcaggtaacaaaaacagtaaaggaaacaagagatttaattaaaaactggaaaagagaaggaaaaacaatcggtcttgtaccgacaatgggattcctgcacgaaggacacgcaagtctgatcaagagatgtcgcgaagaaaatgatatcgttgttgtatctgattttgtaaacccgacacagtttggaccgacagaagatctggaagcatatccaagagatttcaaacgtgacagcgaactctgcgagagccttggagctgatgtcatctttcatccggaaccggaggatatgtaccatgatccacatgcctttgtaagtattgatactttatcagatacactgtgcggtaagacaagaccaattcattttaaaggtgtatgcaccgttgtttctaagttatttaacattgtaacaccggacagggcatatttcggtcagaaagatgcacaacagctggcaatcatccgcaaaatggtacaggatctgaattttgatatccagatcgtaggatgccctatcatccgtgaagaagacggacttgcgaaatcatccagaaatacatatttaagtgaagaagaaagaaaagccgcactttgtctttcaagagctgtaaaagccggtcaggatataatctgcaagggaatcaaggctgaagaagtattaacaaagatgcgcgagatcattgaagctgaacctctggcaaagattgattatgtatctatggtagatgcactgaatatgcaaccggtagaagtcgtagaaaaagatgttctggtcgctatggcagtttacatcggaaaaaccagactgatcgacaactttagctacgaggtatagcatatggaaaatgtgatgaaaaaagtaggaaaagccagttcttttcttacaaaatatattggaattattatcatctgcttctctgtgatcgcatttttttggcgcgatggattcgcgtggacaaccaattatacatccatctttttaggtgttgccatgtttggcatggggcttacaatcaagatggacgattttaagagagttttttcaagaccaaaagaaatcgtgatcggatttgttgcacaatatacgatcatgcctgttgtggcatggggattatgccagctgatgcatcttccgacagatcttgcactcggcgttattctggtcggatgttgtcctgggggaacagcaagtaatgtgatcacatatattgccggaggtgatgtggcactctctgttggaatgacaatcacttccacgcttgcggccccactgatgacaccattattagtgtatctgcttgccggtgcctgggtagaagtatctttccttgcaatggtaatttctgttgtgaaagttgtactgattccggtgcttcttggtattttgatcaactggatctttggaaagcagattcagaaaatatcagaagtacttccactgatttctgttgtatccatcgtaatgatcatcagtggaatcgtatctgtcaatgcagaaaaaatcttaagctgtggtctgctcgtacttggagttgtagcacttcacaatctctgcggaatgggcatcgggcttggtgcagcaaaacttttacatatcgaatatgataaagctactgcgattgcgatcgaagtcggaatgcagaacagcggtcttgcgatttctcttgcaacagctaattttgcagccaatccactggcaacgcttccgggagcgatcttcagtgtatggcataatatatcaggctctttattcgccgggatccgccgtggcggaactgatacgaaagaaacttgcctggaagtaactgaatagatagaaagaaaactcctgtgatttgaatctacaaaatcacaggagtttttccttttcactcattatgctatgtctattgatacctggcaatcgtctctttcaatatctgtgtactatcctaatactactgctatcttgatctctttctctgtctcactaagatcgaatgttcctccatcctctactgtaacatgtacttcatataaggtatcttccgacagtttctctggaatcgttccatcttctgtctgaatcttccacagatcttccggaacctctgtcagcttaccgtcttttccataagcatacagcttaaagtcatccgttttgcctgcaagccccttcattcgtatcgccacagtcgtactcggatgtacattttctaccgttatcgtattcagccatcctgcgacattgcccttacctccgtcttccgtaaattcttcctgcgttaatatatttcgcattgccttgtccaaatctacttttcggtaaggcatttccggaagatatacgaaccgatcctgcagtctgaggagttcaagatatccggttggacagtataatgcatttccactgcttcctgcatacataccgattgccatattgttatatcctggtttgtctgacacgtccattgaaaatgcagtctcaccggtctcaaaatctatcataataaactgccacatgccactgtccaagtcctgaacataaccgtaaatgtatcctgttgcggttgaaagcttcatcatcgatgtatcccggatatcatctctgcaccagatactcttcatttcatatccgtcatctgtcttgatcgtatcaacacgctcaactcccggcatgaccattttatttcctttctgcagccagtttacatcatagatattttcatatgtctgtacagatgaatcgttatctgcgtccgcaagcttcgcacttcctgctccaaaccagttacatacgattgtgctgactgtaccttcactgttatcatatacgattgctgaattttctacggatacctgcatttcttccggcagctcatcaataacaggtgtgcttgcaaccttttcaccggtcttcatatctaatgccagtagattcaccggattctgattatctgtaaacatgaccagattactggttagtgacggcgaacatccgcttccccacgccagaccccctccggtcgtttcatcaccttctttgctgtcttttgcccctgcactttcatacggagtacaccattctacctgtacaccgttatctgctttcagcagatagcagttctgatttgttaagatgaccgcaccctctttcgaagaagctattccattttctgccccttctccaggagttaattcatatacaaatgtagccgctgtcagatcaacctcttctccattcagaattgcgttgatcgcatctctggaaatgtatcccatcgcaccttgctgctgacgttccggatagattctgaatccgccggttgcaaaccagagattcccctcatagtcaaacactacggataataaattctgatccaatgtctttccggtaatcgcctctgccgctgctttaatatcaatatccagcactttttcaaattccggcagcacatttccttcctcgtctgttgctttcaacataagtacatgattgttgcttgtcggacacaccagacgattattttcatcaacaaaggaataggaactttgtatcacataccctccaccgtcatgctgttttggcgagaaatatccgatcgtctgtgtttcttctgcattgatatcacgaattgcaagtcctcccagcaacggaacaactgaatgtccataattgtcaaaaaataccgccggagacgcattcggattcaccttttcataagaaacattaatttctgggtaaataccaacaggcagtacctcatctgttgaatctgaattataacaatcatggtggatattcgcatcattttttgccatataaggattctcatcgattgccttttgggtaagcggttttatcgttactcctgagcttacactttctgtttttgtctgttcctgtttcacctcatctgtctttggttcattcgatgaacaacctgatgtcattgcgactgatgatataataaatgctaaaagaattgttcgttttttcatattattcggcctcctttttctcgtaatctgtaactgttcagagccaagcagaatttcataaaacaagtgtaaaatgcttgcatttttaagactgtttttgaaattttatttggcggatacgccacaccgacgaaatgcgtagcattttgaaggttggctctgaacagttatgtttttattataaaaaaacatctcttattttcaattcttttggcacgaatcatgctaaaatggcacgaattgtaaaagacaccatctcctgaccgaattacttttcagccagagatggtgcctttgttatccacattcttctgttaaatgaaatcttttttccacatttatttaatgtttttcacattccggatgtggatttccagttgcttttcacactacgtgcacccggcaacaatttctcttcatgtttaaaaattaatatatccctgcagccagatcgtgcctttgaaccttcttccgatttccggctctcccatcacggaatctgccggaacacagacatcaaatgtcagttcatttacattcaggcgcatctgatacaatctcacacctgtcattctgttgatccgctctcttaccgccaggatttctcccatgatcgaatacatatcacattctgctccaaacggcatgaaatacgtatctacaatggaaaatacatcctcattcgccaatctctttgacaccttggaatagagatccatatcgtcaaatgtcagcgtctcgattgctgcctggtcgcccttgcgggctgcgttcatcaattctcttcttgtatctgacgcacgcttttcatttaaaatctgctgctcatttttattaaccggaagcaggatcattccaccttgtgccaatcctgaaaatgtcactgaggtctgcacatcttttgcaagaccagcctgtttctcccgcatatattccacaccattctgcagtgtgaagatcagactgattccgatcttggaatcttcacaaagaccaacatactgttctttctcaatctttctctgcacatcgatttctgcatacgttgtaactccgcttccctcaaagtatgggaaataatatgcagcttcaaaatgttcctcatcatcaagttctccgcagagtgtgatccctacatcctgaccgaactctttctggaattcgcagaaatcttcgcccggtctgtaggatacaattgtctgatgtgtgaaattctcttctacttcttttaagagctttttcagatcttttcttgtttgaatattttcaaatccaatcgcttttaaatactgatgcatattttatttgctttatatttctttatttgttctttggtgtaatttctttgtttccacccatgtatggctgaagaacttccgggattcttacagaaccatctgcctgaagattgttctcaaggaacgcgatcagcattctcggtggagcaacaactgtgttgtttaatgtatgagcgaagtagcttccgttctctcctttgatacggataccaagtcttcttgcctgggcatctcctaagttagagcagcttcctacctcgaagtatttctgctgtcttggtgaccatgcctctacgtcaacagattttactttcagatctgcaagatctccggagcagcactcaagtgtacgtaccggaatatccatagaacggaaaaggtctactgtattcttccacagtttgtcataccattctttgctttcttccggttcgcagacaacgatcatttcctgtttctcgaactgatggattctgtaaactccacgctcctcaattccgtgagcacctttttcttttctgaaacaaggtgaataacttgtcagagtctgtggaacctgatctttctccaatgtctgtccaatgaatttaccaatcatggaatgctcacttgttccgatcagataaaggtcttctccttcaatcttgtacatcatggcatccatctcagcaaagctcataacacctgttacaacgttgcttctgatcatgaaaggtggtacacagtatgtgaatcctctgttgatcatgaaatctcttgcataagagataactgctgagtgaagtcttgcgatatctcccatcagataataaaatccattacctgctactcttcttgcagcatcgagatcgattccattgaaagattccataatgtctgtgtgatatggaacttcgaaatccggaacaaccggctcgccaaatctttctacctctacgttctcactgtcatctttaccgatcggtacggaaggatcaatgatgttcgggatgatcatcatattctttttcagtttctcttctacttctttctcttcctctgaaagttcattgatacgtccattactctctgcaactttcttcttcagtgcttctgcttcttcaatcttcttctgagccatcattgctccgatttccttagaagctttgttcttctctgcgcgaagtacttctacttcctgtttgatttctctgtttctcttatccagttcaattacttcatcaacaagtggaagcttctcatcctgaaatttatttttgatgttctgttttactacatccggattatttcttacaaatttgatgtctaacatgttatttaccctttcctgtctaatttcttttttactatttatttttcttgaaaaatagctttctcaagactttctctttcttcctctgccagctgaattgtactctcaccttttacaatatctttcacatatgcataacagccctgacggctatgcattatatttaagatccatccagtattgttttcatctaacattgtaattgcaaaacttaattcgcctcccatttcatggaatgcatcatattttacgattccgactttctggtaatgcgttttcattttattataaagttctgcaatctcctcacggttttcttccacctgatctacgacttcgtcgatcttgtcaaaccgttcaaaaatggattcctccagtgatttcccattctttcccttcataaaggtattaaatactttttccaggtgtttatacttatcatacactaacaccagtacgacaagcaaggctacctgcaaaataagtaaaataagaaatgcgtagaatggatcaattcccagattgccaaatactccagtcacttctaccatctcctttttaattatgctggattgtcatgagcaactcatagattctttccagatcatccggtgagtaatactcaatctcaatctttccttttccatttgctttcgcgtgaacacttacttttgtaccgatcagacttttcatctgctcttcaagatttgtgtatacgaactgattttctacttccggctttttttcttcctttttcggattcttcagagccttcaccagtttctctgtctcgcgaacactaagcttctcatcaaagattttgttggcaagcatgtactgctgctcttcatcctcgattgccagaagagctcttgcatggcctgtactgatcatatcgtcaatgatcatctgctgaactctgtcattcagttttaataatctcattgagttcgtaaccgcagttctgctctttgacactcgttcagcaacttcatcctgtttcaagttgaattctttcaacagtctcttataagccattgcttcttcaatcggattcagattttctctctgaatattctcaatcaaagaaatctcaacaatttcctgctctgtaaattcttttacgataattggcacttctttcaatcctgccagctttgccgcgcgccatcttctctcaccggcaataatttcataatagtccttcttcttctgaacaagaatcggctgtaatacaccaaactgtttaattgaatctgcaagttccatcaatgcatcttcatcaaaatcttttcgcggctgctcccgatttggttcaactttatttatcttcaccatgatcggtcctgcctctagaatttcttctttcggagctgcctttttctcgtccgcttttacagaaggttttgcgcttttaacgtttttgtttgggattagactatccaatccttttccaagtccgctcttcttcacaggcatacttattctcctttattaatcacttcttctgctaaaagcatgtaactctctgttcctttggattttggatcatacagattgattggaagtccataacttggtgcttcagccagtcggacatttctcggaataattgtcttataaatattttggttcagattatcctttacattttccactacctgtaatgataaatttgttcttgcatcgtacattgtaaatacgacaccttccatttcaagtttcggattcagtctatcctgaacaagttcaatcgtatgcatcaattgacttaatccttccagtgcataatactcacactgaattggaacaatcaccgagtcagaagtagtcattgcattaattgtaagcatactcaatgccggagggcagtcaataattataaagtcataattatcttttatcttttcaacttcatctcgtaaaatatattccttattgtcaacgccaatcagttcaatctcagcggctgataaatcaatacttgacggaagcacatctacgctcagattttctattggttccttgcaaatacactcctcaattttacacttaccaataataagttcataaattgtcttttcgacctcattcttatcaacgcccaatccactggacatattcccctgaggatccatatctatagcaagcactttttttcccgaactagctaaagaggctgataagttgattgctgttgtagtcttaccaactccgcctttctgattcgcaattgctatcactctacccattatttttactcctttctctcggacattcattattatatcacctttcttttcattaatctagaactaatcaaacgtttcacgtgaaacatcgttactgttcacacaatgtgcgaccagcaacgcatctcgccattttaaatcgcctttggcgatagggcgagatgcattcaagccaaaacatgcatcctccgtgtcaatcagcgaagtgattgacacgggagtgaacagtaacgaaacatcttccttcttattttctaaaatgtttcacgtgaaacattgtgttttctcagttatttctagtactgcattttgtaaataactgtattatacgcgcagggtgcggattcgattgtgcggatcaaaaatgtttcacgtgaaacatttttagagataatccacttcttctataattaaacattaagattttttcgctttatttgaatttaagaatgtagtataataaagtaagggtttcttttaattcagactcttacttttatataaaacaaaccactattataataaggaaggtgaataatttgagtattaagaaaaaactaactttttttactactttagcaggagtttctctcggtgcaatgcatattgccaaccgtgtattagaatatatctcaactgctgataaattaatcaattctgatgaatatgaatactataactggagatttggcaaaatcgcatataagaaaactggtgaaggatcacctttacttttagtgcataatctcaatgtatgttcttcttcctatgaatggagaaacaatatagcggaacttgccaagtcccatactgtatatacaattgatcttttaggctgcggttgttccgatcgtccgggattaacatatactaattatctgtatgtagaattaatcacgaactttatcaaacatattatcggagaaaaaactgatgtaattgtttctggtgaatcctgtccatttgtactaatggcctgtgcaaacgatgaaacaattataaataaagttattatgataaatccgccgaatctggtagacctggcaaagattcctacaaaacgtagtaaattcataaagaatatcctgtattctcctattctgggtacatttatctataatatgtatgtaaataagaagacaattgctcatgccctctgctcttcttattatactcagaatgaaattagtgaaaaagatattctcacctactttgaagcagcacacaaagaacatacaaattccaaatatcttttcgcctgtcaaaagacgagatatacgaatgcaaatgttcttcactgtctgaataaattaaataacagcatctccattattgtaggaaatagtaatcctgaaaattctttggcagccagtgaatatcagaactatcttccttcgattgaaattgcaggaatggccaaaaccaaacaacttcctcatattgaaaaatgtgacgaattcattgaaaatgtagaaattttcttgtcagacgctgaagaatgtgaatagaatatcgcataaattagaaattttactcgtatcatattttttctaaaaattagagttatccacattttccacatgagatatccacacagagtgaatatctcatgtggaaaatgtggataacttcttctttttttgagtatatcttctttttaaacttattttctgactatttcggcatttttcaacaatacactcaaaaaggaagacctgttcaccagaatgccagtaaacaggtcttcctatatttgcttattttaatggttcttttgccggtaatcctgcttttctaggatattttcccggtgtctgctttgtttttttaatttcaacaagtgcacgacccatgtcggttccaggtaattggaacttatccacattccttacttttccacctaacagtgaaatcgcatgttttgcctgctggatttcttcttcagaatctccacttttataagaaacaaaactgccatttacagctacaaacggaaggcaatactcactcaatgttgacagattcgcaacagctcttgaaacgcagagatcaaactgctccctgtattcctttttctttgcaaaatcttctgctcttccatgaattgtactgatattttccaatcctaattcttcaattactgcatctaagaacttaattcgtttattcaatgaatcaagaagtacaaccttcagatgcggaaatgcaatcttcagaggaatccccgggaaaccagctcctgttccgatatcgatcacactctgcaccttctgcatctcctgtgttcttgcgattgtcagactatctgtaaagtgcttcagattcacctcatcatactccgtgatccctgtcagattcatcactttattccactcaaccagcatctcataatacttgtcaaactgctgcttctgtcgctcatttaatgtgattccgattttttctaattctagatcaaatttactctgtgtgttctctcccactatattctccaatcatttcttcccacggaacagtttcaacaatccgacaataccattccgtagaatatttagcatttttagattctcatgtattgctttaactaacactttatttactgctcaaatacacaagaagcacggacacatctgccggtgaaactcctgagattctggatgcctggccgattgacgacggacggatctgattcagtttctgctttgcctcaagacgaaggctctgaatctcatcataattaatattttctggaattctcttgttctcaagctttttaaactgctctacctgacgcatctgacgcttgatataaccatcatatttgatattaatatcaacctgttctttcacatcatatggcagttcttttctgtgcttatcgatcggtgcgatcttctcataagacaactccggtctgcggatcagctctgcaagtgttgttcctgatgtcagcggtgtactttcataagattcaagcaatgcctgtacagcttctgtagtacctacatttgtgtgctccacacgctcgatctctttctcgatcatctcttcctttttcagcagtttctgatatctctcctcatcgatcagtcctacctcgtaaccaatctttgtaagacgcatatctgcattatcctgacgaagaagcagtctgtactctgcgcgcgaagtcatcatacgatatggttcatgactctcttttgtaacaagatcatcgatcaaaactccaatatatccctgagatctgtcgatcacgataccttcttttccctgcagctttctcgccgcattgattcctgcgatcagtccctgggaagcagcctcttcataacctgaacttccgttaaactgtccaccactgaacagaccttcaatctctttgaattccaatgtactcttcaactgtctcgcatcaatgcagtcatactcgatcgcatacgcatttcgcacgatcttcgcatgttccagtcctggcacacttctgtacattgcatactggacatcttccggaagtgaactggacattccgccgacatacatttcattcgtctcaagtccttccggctcgataaatacctgatgacggttcttgtccgggaatttcacaaccttatcttcgatcgacggacaatatctcgggcctgttccttcaattgctcctgaataaagcggtgaacgatccagattgccacgtatgatctcatgtgttgtctcattcgtgtatgtcagccagcaggacgcctgatcgatctgaacactctcaggatctgtagtaaatgagaacggtacaaccctctcatctcctttctgctcctgcatcttgctgaaatcaatcgtattcttatcaatacgcgccggtgtacctgttttgaagcgatacatcttaattccgagtgctttcagactatctgtcaggtagttggcactctgaagcccgttagggcccgtatgcgtgcttatttcgccgtaaatacagcgtgcctttaaatatgtacccgtacagagtacaacggccttacagcggtaaatagcgcctgagtacgtctgtactcctgtgattttcccatcctctgccaggatctctgtcacttccatctgacggatatccagattctcctggttctgaagcacctgacgcattgttttactataatttgctttatccgcctgtgcacgcagtgaatgcacggcaggaccttttgaactgttaagcatcttcgactggataaatgttttatcaattacttttcccatctctccgccaagcgcatccagctctctgaccagatgtccctttgagcttcctccgatgttcggattacaaggcatcagcgctatactgtccacactgaccgtaaagatcactgtcttaaatccaagtcttgcagtcgcaagtgcagcctcacaacccgcatggcctgcgcctacaacgacaacatcatattcatctttattttcccatacagaacttgctgaatatttcatttactaaatcttctcctattgattctccggtaatatttccaagtgattcataggcatccatcagatcgatcgaatagaaatcctccggcatgccggcatcaatgctgaaaatgactttcttcatactctctctcgcattgaccaatgcatttttctgtcttgcatttgtaatataaacctcttcattgaatgagagatctccctttaagaacattgctttcacggtgttctcaagttccttgattccctgctcttccttcgcagaaatcgcaatcacaggaatctgcttctgaacacctttttgtgaaatcctttcgcggatcatctcttctgtcactacggtatccaaatccgacttattaagcagaatcactgttcttttatcataaatcaaatcaaagattttttcatcattttcgtcaagatttcttgatgcatctacaacataaataataagatctgcctcttttgcatattctttcgccttatcgacacccattttttccacgatatcgtctgtctgacggattccggcagtatctatgatattcaaagtcagtccctgcagacggatctgttcctccagaacatctcttgtcgttccttcaatatctgtaacgatcgcacggtcatgaccagccagaatgttcagaagtgaagactttcctgcattcggttttccaagaattactgtctggattccctctttcatgatccttccatcatccgaggaatcaatcagttctttcaactgcccgatcacctcttctgctgcctcctttagcacctcaccgtatccatcgacactgatatgctccgggtcatccagcgcagtctcaataaacgctgtatgataaatgatcttctcacggatctctttgatcctgttcttcacacttcccttgagctggctgatcgaactctgcaatgcatactcattttctgatgtaatcacatcaatgaccgcctctgcctgtgacagatccatcttgccgtttaagaatgccctcttggtaaattctcccggctctgccggtcttgctcccgcctttaagaccgtctccaaaactctgcttacaacataagttccaccgtggcagttgatctcaactgtgtcttctcctgtaaatgtgcgaggtccgcgcatcaccatcacaagtacttcgtcaactgtctcatctccatccattacatgtccataatgaatcgtatgcgttggcacttctgtaatcgtttctttccctttatatacacgacctgctatctccagcgcttcacttccgctgattcttacaattccgattcccgaattagtcatacctgtagaaatcgctgcaatcgtatcctgattcatgccttatttcctttctgttttcctgctctgtgcttggcacacttcctgcttccaactgttttttctttacagtatttccttttttctatactttacatagaaaaaaggacgttccacacctcacgaaagtatccgtgaagcgtaaacgtcctttcgcttccgattcataaacagtattatttcttcaaagtaataacaacttttctgaacggctcttctccctcactgtgtgtcatcacataaggatctgactgcagtgctgagtggatgattcttctttcgtaaggattcatcggctcaagtgctaccggtcttctgtttctctttaccttatgtgcaatgttctttgcaaggtgtctcagagtctcttctcttcttgcacgatagttctctgtgtcaagctttactcttacataaccttcctgatgcttgttcgctacacggttcgcaagatactgcagagaatccagagtctgtcctctcttaccaatcagaattcccatatgctctccactcatatctacgcaaagtgcaccatcctgatcgatctcagtcttaagctcaacttccatgtccatggctttcattgtattcttgaggaaatcttctactgctttgattgtctgaggctgaacttctacaagttttgtctctttcttaacttcctcttttgcttctttttctacagctttttcaaaagcagccttctgaggttcatccgctttcttttctgcagctgctttctgaggctgaactgcttcaaccttctttggctctactctcacaggttcttctactacaggctcttctaccttctcctctttcggttccggttttcttcttgcttcaataactgcctgcttcattccgattcccaggaatcctgcgcttcccttctcgattacttcgtactccagtctgtcgcttgttacaccaagctggatcaatgcttctgtgatcgcatcatcaactgttttcgccgatactctgatactaccgttcatcccgattcctccatcttcaaatcctgacccgtctcctgctttttaagagaacggttaggagttacgaatcttcctttattttttcttgcccttttttcctttggagctgctctcatcttctgccttcggctggtttgtctgctgtccgctgttataacggcttaccagatttgccttagaagcaaggcttcccggcttggaattctgagccttctgctgtgctttctggatcttttcttctctctctgcttcagaaattccagattttccttttgtaacagtacccacattacgagtacttgttgttgccatcttattgatctcttttgcaggagctccgtgtttctcacgtttcttctgtgctttctcctggttctctttgatcatctcatcaagagactttgtgctgagatatttgttgattgcaagctgctgaatacatcttactgctgcacttgctgcccagtagagaccaagacctgccggaagtgtgaatcccataaatactgagatcagcggcattgtgtatgtcattgtcttcatagagcttgccatcgggttatctttgtcatctcctgccggctgtggctgaagcttaacactgataaactgtgtcagacctgcaagtaccggaataagtactgcaaggatgatccctacaacggatccgttgtggaatgcagctgtcaactgtgtcagcggctgttctccgatattaattccaaggaaactgttcagatgagtaaccttatccattgtctgctgtgcaagatccgtgatactcggcatcttttccatcagcgcattccatgtagaatcctggaatttataaagtacatttacaattgtatctgcctgagaataatcataagccttcgggttcataagaaccgggcttgcttcaccgatcgtctccatgatcttctggaagccatttgtattcatgattgcttctgtcacaggcatataaacatctttaacaccttttacatacgttggaatatcacggataaccggatacagcgcgaacagaatcggcatctggatcaacatcgggagacatccacctgtcatggaagttccatacttctcataaacaagattgatctcttcctgctgcttcatcattgaagcctgatctttctttccttcgtattttttctgaattttcttgatctccggctgcataacagctgacatcttagaaaacttctgctgcttgattgtaagcggaatcatcaatgtataaataatgattgtgaaaataatgatacaaacaccaatattctcaataccaatcttactaagtacattgaagataccattcattacctgacctaaaagccaggcaatctgtttgataatcggccagtctccataacctgaagccaaaagtccgtatacttccattacttatcctccttaaggtaccggatcatatccaccttttgaaaatggattacagcgcaggattctccataccgccagagcccctcccttgagtgctccgtacttctcgattgcttccaacccatactgtgagcaggttggataatacttacaagtgcatccgcccttcattccggacagatatttcctgtaaaaacgaatcatccataacaagacatacttcatctgcgccacttccttatcattgtcttatcagacatatatgtgatgaagctttccgagatggatcagtgcactttccacatcatgataattcttatcctttgcacttgttctcgcgattactactatatcatacccacatcggaaatgttcttctgataatctgtaactttctctgatcaatcgggtaagatgatgtcttaccacactgtttccaaccttcttactaactgatattcccagtcggttcctattcagttcgttcgggattatatacattacaagacatttattagcgaaagattttccattcctgtagactgactgaaaatctttattcttttttaaagactcagaaaatttcatcaatatcctcttcattccagataacaaaaatcctgttatcatttaatattaaatagaagaaaaggccacatatatgcggcctatgctgataactgttttcttccttttgctcttcttgctgccagaacttttcttccgcctggtgtgctcattcttgctctgaatccgtgaactttagatcttgatctcttcttcggctgaaatgtcatcttcatattcttacacctcccttatgcctgatataccttataataaaagtattcacaaaattaacttcgttactgcgcctcaatattaaaagacactgctcttaattatagagggaaaaccgcataaagtcaagctttatcaacaatctttccctcaatttctggccttttttcattttaaagagtttttcacattttctgtgaataatttcacagttcctcgaaccccttatatatcaagggatataactattttttcacataattatacaatagttatacagaagttatccacaaagttatcaacatatgtggataacttctgtataacctgtggaaaaccactaaatatcgtgttgataaaaatttttttattcataaaaacccatatttatcaacgttttaagatgttgataaagttatacacactgttttctcattgattctacagcttttttgatgtagaatgtaatggagagactctaccatttttagagttatccacattattttagtacgaagttaataaaaagtggctgtttttcacttttttaacaaacagttgctgaaaacattgtatttgggtagggggaagtctgccctaaaagccataatcaggagttgaatgtggataagtcctgaattatttacgctggattttcaacctttccattataattttaaaaaattaggagttactatcgatgaacattgtagaacaaaactgggatcaggtactaaacaagatgaagctggaatattgctcatccaatatttcttatactacatggattgcaccacttactgtttatgaagtcaaggacaataccgtatatattctcgtcaaactgaaggcgagtcttgaacatattcaagataaatatctgcttccttttaaggtctgcatcgccgaagtaaccggtacagaatatgaagtggaatttgtaaccgacagcccgaaagtgattaaggaaaagaaagagtcttccgtccagaagacccgtgtaaatgcgatttatgaaaaggcaaacttaaatccaaagtacactttcgacacatttgtcgttggaagcaacaacaatttcgctcacgctgcttccctcgcagttgccgaatctccgggagagatttacaaccctctcttcttatatggaggtgttggacttggaaagacccatttgatgcactccgtggcacattacattttggaacatgatccctccaaaaaagtactgtatgtcacaagtgaaacttttacgaatgaactgatcgatgctcttaaagtaggtaagaacggaaatgaactggcaatgaccacattccgcgagaaatatcgcaataatgacgttcttctgatcgacgatattcagtttattataggaaaagaaagtacacaggaagaatttttccatacatttaatcaccttcatgtgtcaggaaaacagattatcatctccagtgataagcctccgaaggacattgagacactggaagccagacttcgcacacgttttgagtggggtctgattgctgacatctcctctcctgactatgagacaagaatggcgatccttcgtaagaaagaagaactcgacggacttgagaaatatcatattccggatgaagttatgcagtacattgccaataatattaaatccaatatccgtgagcttgaaggatctttgaataaactgatcgctctttctaatctggagaataaaccgattgacattcctttggctgctgaggccttgaaggatatgatctcaccggatgatacccgtgcagtttcaccagaactgatcatggatgtggtttctgaacactttaatgtaccggtagctgaactaaaaggtaaaaaacgaaatgctgagatcgttcttccacgccagatcgtcatgtatctgtgcagaaatatgaccgatacaccactaaaatccattggtgccctgctcggcggtaaagatcatgcttccattagccatggtgtacgcaagattgagaatgatctgaagacagatgaagctttaaacaacactgtgaatataattaagaaaaaaatcaatcctgtataaggaagataactctataaaatgtgaataacctgtcattttttcgcgttaattgtggataactttgtagaaaacctgtagatttctatgtgaataacgttgggataacaaaaatgtggattttttgccgaatttttttccccacagttttaacacgttatttttctgtaatctacatagttatccaaacccgcaaacccttgattttaaagggctgcaggtacttatccacttatccacagcccctaaggcggaggagacggaatcgatttatataaatatacataaattacgcgagaaaaaaacgttatccacatatcaactgtaaccttgaaacctgaaaggagtaatcatcaacatgagaatcatatgcaaaaaatcgaatctcgtaaaaggagttagtattgtttccaaggcagtaccctctaaaacaacaatgcctattcttgaatgtattctgattgatgcaacaacggatgtaatcaaactgactgccaatgatatggaacttggaattgaaactacaattgatggaattattgattccagaggtattattgcattaaatgcaaagattttttcagaaattgtccgtaaacttccagacaatgatgttgttattgaaacagaatctgacaatcaggcgattattacttgtgaaaaagcgaaatttaatatcgcagcccagtcaggagatgatttttcttatcttccagcgattgagcgtgaagattttattactatttccgagtttactttgaaagaagttgttcgccagactattttttcaattgctgataatgatacgaacaagatgatgacaggagaactttttgagattgacaatgatgttctcagagtggtttctcttgatggtcacagaatttcgatccggaaaatcgaactgaaagatgcttatcagccgagaaaagtgatcgttcctggaaaaactcttcaggaaatcagcaagattattggcggtgaagcggatgctgaagtcgagatttcgtttacaaaaaatcatattgtctttgaatttgacagaacattggttgtttccagactgattgaaggtgaatatttccgaattgaccagatgctgtccagtgattatgagacaagagtacatgtgaataaaaaagaactgttagattgtattgatcgtgcaactctgcttatcaaagagggagacaaaaagccgattatcattgacatcaagaatgaatcaatggagttgaagatcaaatcacagattggatctatggatgaactgattttctgtacaaaagatggaaaagatctgatgatcggatttaacccaaagtttttgatcgatgcacttcgtgtgattgaagatgaagaagtagacttgtattttatgaatgcaaaagcaccttgctttatcaaagacgagaatcagtcttacatttatctgattcttccagtcaattttaatgcagctgtctaaccccagaaaataatagattatgcggagcagatgccctgctctgcaattttttgactttttaaaattcagaaaatgaaaagtttaaagatgtttaaaaaagtttaaagaaaaaataaagatcaaaaatactgatgaaaattaatcaaggagtgataagaaatggaaataatcaaactgcgccctcaggatgaattcattaaactcggtcaggcgctcaaggcagccgggttagttgaaagtggtgttgaggctaaggacgtaattcagaacgggcttgttcttgtaaacggagaaattgatacgagacgcggaagaaagctttatccgggcgatacagcttcttttgacggaaatgaaataaaaattgaaaaataattaaaaaacgtgtagaataacatgtgagaggttttctcgctcgtgttataacgtgatggcggggaaattatgataatcaagtctttaaagctgaaaaattacagaaattatgatttattagatttgacctttgatccgaaaaccaatattttgtacggtgacaatgctcaaggaaagacaaacatactggaagcattgtatttgtctggaacgacgaaatctcacagaggaacgaaggatcgggatatgatacagtttgggtatgatgaatcccatctggagacagtagttgagaaaaagggaatcattttccagatcgatatgcacctgaagaaaaacagtccgaagggaattgcaatcgataaggtaccgattcgccgtgcaagtgagttattcggtattgtccattttgttttcttttctccagaggatcttaatatcatcaaagagggtccggcaggaagaagaagatttattgatcttgagctttcccagcttgataagatctatctgaacaatctttcgaactataaccgtattattaaccagcgtaattcacttttgaaggatatctatggctcgaaccagcagcatttgctggagacactggatatctgggatatgcagctggctgcttatggaacaaaggttttggacagaagaaaagaatttgtacgacaggtgaatgagattatttcagagattcatttccgtctgacaggcgggaaagaacggctgtcattgacttatgaatcaagtattggtgagatgtcgatggagcaggctctgaagaaaaacagggagagggatctgcggatgaaaagtacgtctgtaggtcctcatagagatgatctgtgtttcctgtcaggagatttggatattagaaaatttggttctcagggacagcaaagaacagctgcgttgtcgctgaaattagctgagattgaactggtgaagcggatcattggggatacgccgatcctgttattagacgatgttttgtctgaattagataaaaacaggcaaaactatttactggatagtattcatgatatacagacggtgattacttgtacgggactggatgagtttgtaaatcatagattttctatcaacaagatattccatgtaaaaagtggacatgtagcaaaagaaaactaggaggtttaagaatgggtgcatcaggtacagaatttgacgctgaatacggagcggaccagattcagattttggaaggattggaagccgtaagaaaaagaccgggtatgtacattggcagcacttccgtcagaggacttcatcacctggtttatgagattgtagataatgcggtggatgaggctctggccggatactgtgataaaattcaggtagacattaacaaagacaattcgataacggtcacagacaatgggcgtggaattcctgtaggaatcaaccataaggcaggacttcctgcagttgaggttgtatttacaatcctgcatgccggaggtaaattcggcggtggagggtacaaggtatccggaggattgcacggagtaggtgcatctgttgttaatgctctttctgagtggctggaagtagagattgccaacgaaggcaagatttataaacagcgttatgagcgtggtaaagtatgctataaactcagagttgacagagaatgtgagccggagatgagaggaacaaaggttactttccttccggacaaggaaatctttgaggaaacagtatttgattataatacactgaaacagcgtttccgtgagatggcattcctgacaaagggattgaagattcacttaagagatcttcgtgaggaagagatccatgagcatatattccactatgaaggtggtattaaagaatttgtaacatacctgaacaagagtaaaactgcgctctatgagcagattatttactgtgaaggtatgaaagataatgttgcagttgaggttgccatgcagcataatgactcctacaatgagactacttacggttttgtaaataatattacaacgccggagggtggtactcatattgcgggattcagaagtgcattgactaaggtattcaacgattatggcaagaaaaataagctgctgaaagagaatgagcagctttcaggagaggatatccgtgagggactgactgcgattgtcagtgtcaagattgaggatcctcagtttgaaggacagacaaagcagaaacttggaaacagtgaagcacgtggagctgttgataatatcgtcagaacacagctggagatcttcctggagcagaatccaagtgttgcaaagatgatcatcgaaaagtctgttatggcacagcgtgcccgtgaagcagccagaaaagcaagagatcttacaagaagaaagtcagctcttgagggaatgtcccttccgggaaaactggcagactgttcagacaaagatccgtccaagtgtgagatctatatcgtcgagggagattccgccggcggttctgcgaagacagccagagaccgtgcaactcaggcaatcctgccacttcgtggtaagattctgaacgtagagaaagcacgtcttgataagatttacggaaatgctgagattaaggcaatgatcacagcatttggaacgggaatccacgaagattttgatatcagtaagctgagatatcacaagatcattatcatgaccgatgccgatgtcgatggagcgcacatcagtacacttcttttgacattcctgtatcgtttcatgccggatctgatcaaagagggatatgtatatcttgcacagccgccgttgtataagctggagaagaacaagaaggtatggtacgcatacagcgatgacgaactgaaccagattcttacagaagttggtcgtgacagcaacaataagatccagcgttacaaaggtcttggagagatggatgcagagcagctttgggagacaactatggatccggagcacagaatccttctgcgcgtaacgatggatgatgagacctcttccgagctcgatcttactttcacaacccttatgggagacaaagtagaaccaagaagagaattcatcgaagaaaacgcaaagtatgtacaaaacttggatatatagtagttatagcgacacaacaggcaacttcgggcagggctgattcgagtttactcgaaagcagacctggacgtagttgtctgggttggcattagaaatgccaacccagcgaaaaaatcgtcagatttttgagctggtgtggagcgtaagaacgcgaaacccagtcaggttttgaatatgatagactgaccctagaaaaaaggagacaagtgatggaagacaatatttttgacaaagtccatgaagtcgatctgaaaaagacgatggagacttcatacatcgactatgccatgagcgtaatcgctgcccgtgctcttccggatgttagagacggacttaagccggtacagagacgaattctgtactcaatgatagaattaaataatggaccggacaaaccgcatcgtaaatgtgcgcgtattgtcggtgatacgatgggaaaataccatcctcatggagacagctcgatttatggagctctcgttaatcttgcacaggagtggtctacccgttatcctcttgtagatggacacggaaactttggttcagtggacggtgatggcgctgctgcaatgcgttatacagaggcacgtctgagtaggatctccatggagatgacagcggacattaacaaaaataccgtagattttatcccgaactttgatgaaacagagaaggagcctactgtacttccgtccagatttccaaatcttctggtaaatggaacatcaggtattgcagtaggtatggcaacgaatatcccgccgcataatctgcgtgaggttatttcagcagttgttcagatcatagatgatcagattgcagataaagaagagacgacaattgaggaaatcctcgaaatcgtgaagggaccagatttccctacaggtgcggagatccttggtacaagaggaattgaagaggcatacagaacaggacgcggtaagatcagagtgcgtgcggtgacaaacattgagccaatgcagaacggaaagaacagaattattgttactgagcttccgtatatggtaaataaagcacgtctgatcgaaaagatcgctgagcttgtaagagataaaaagattgatggaatcactgatttaagtgaccagtctaaccgtgaaggtatgagaatctgtattgagcttcgtcgtgatgtgaatccgaatgtaattctgaatcagttatataaacatacacagcttcaggatacatttggtgtgatcatgctggcgctcgttgataatcagccgaaggttatgaatcttcttgagatgttgcagtactacctgcgtcatcaggaagatgttgtgacaagaagaacacagtatgacctgaataaagcacaggagagagctcatatcctggaaggattactgattgctctggataacattgacgaagtcatccgcatcatccgtggttctaagaatgttcaggaagcaaaagcagaattgatcaaacgctttggactcagtgatgcccaggcacaggcaatcgtagacatgcgtctgcgtgcactcacaggtttggaacgtgagaagattgaagctgaatatgcagagcttatgaagaagattgaagagtataaagcaattcttgctgataaaaaacttcttcttggtgtgattaaaaaagagattcttgtaattgctgagaaatacggtgatgacagaagaactaagattggatttgatgaatttgacatctccatggaagatctgattccgcgcgagaatgtcgtaattacaatgacaaaacttggatatatcaagagaatgtctatggacacattcaagagccagaatcgtggtggtaaaggtattaagggaatgcagactctggaggatgattacatccgggaactgtttattacaaccagtcaccattacattatgttctttacaaacacaggccgtgtctacagactgaaagcttacgagattccggaggcaggaagaactgcgcgtggaacagcaatcattaacttactccagctgatgccggaagagaagattactgcgatcattccgctgcgtgagtatgaggaaggtaagtatttgttcatggcaacggagaaaggtcttgtgaagaagactccgattcaggattatgcaaatgtcagaaagacaggacttgcggcgatcgtactgcgtgaggatgataagctgatcgaggttaagatcacagataatacagaggatattttcctcgttacaaaatacggtatgtgtatccgtttcaatgagacagatgtacgttctacaggccgtgtttctatgggcgtacgcggtatgaacctgacagataatgacgttgtgatcggtatgcagatcgaaagccagggcaaagatatgctgattgtatctgagcgtggtatgggtaaacgtacagacatggatgaatttactcgtcagaatcgtggcggtaaaggtgtgaaatgttataagatcacagagaagacaggaaatgttgtcggaatgaaagctgtagatgaagacagtgagatcatgatcatcaacacagagggaattattatccgtatgaagtgttctgatatctctgtttacggcagaatcacatcaggtgtaaaactgatcaacctgaaggaaaatgacactgtagcgagcgttgcgaaggtgagaaaggcttctgccgagatcgacggtgaagaagttgagatttctgatgaagatgagtctgaaaaatcagaggaaggatcagttcctgagacaactgagcaggaaacaacagaggaataaagttgttatgttttacagaagattgtaagctgttcggaaaaataaaaagacaagagaaagtggatggagtttacttgattacggtgaactttatccgctttcttttttgagtataaagaattgaaaatggaatcaaaaggaataaaaaagagacggaaaaaataaaataaatcaagtaaaacagattggaagagtgaaatgaaaaagaaaacaggatacttttttctcaagttttttatacgtgcaaccataggaatggcgttgatttttataataaacaaatatgttcttccagcagattcttcaattaatgtcggtttgaatccgatgacctttttgacatccggaacccttggaattcctggggtttgtcttctttatagcattacatggtatcaatttttgtaagttttttacaaaaacattatatttttaattttggtatggacaaaacagaagtgcccgtatataatctcacttaccaacagaaaatcatctgttgcagcatcagtgaattggggaattactgatgtatcttttgcatcgaagcgttggaccttcggtacaatttctttattcaggctgtatgatcgcagcaaagtttcgaattatgacaattgagcaaagagcagtaagaggaactgctgagaattttgtgatttgtgatacacaaaagagttattcagaaaatctgttcagaagattatctgagaaattatccggttattttcagtttcatgtatttcatgatattgagaatctgaaaatagcagccaagagtatgcaggtaaatattctgctgatcggagaagagtatggaaaagaagaccgggatgagattccggcaagacagaagtatcttctgatcggcgagaagattccgaacgagagaagtcccacagagattccattcttccggtatcaaagtgtcagcagcatgctggaacttttacttcaggaaaaagatcaggaaaattcagaagtacagacgcatcaaatccaactcgtctcagacagatcgcagacagtgaaagcaaatgtaaatggtctgatcgggatctattcaccggttcatcgaatcgggaagacaaggtttgccatgcgtatgggacgagttctttcagaatcgattcctacgttgtatctgaatctggaaggatattcaggattaaattattacctgccggaagaatctggaatgaatcttggagatctgctgtattacatgaagcaggaaagtatcaatccagtatggaagatcagtactttgatcagccatatgaatggggtggattatatcgcaccgatccgggcagaacaagatttcagagaagtgacaaaagaagaatggaatcaacttttggatctgattctggagaagagtatttacaaagtgatcattcttgatcttggagatacggtagacggtctgtatgatctgttaggaagatgcagtaaagtttatacgccttacattgaggaaggtgcagcaaaagcaaaactcaatcagtatgaagagaatcttagatcagcaggatatggcgagattcttaagaagacggtaagacgcagaatgggaaagccaagaaatcctgttgctttagaagcatctgcaagtaaaattacagaatttccggacagagaaaggaagtcgtaaggatgattagaaaagagcagctgtatgaacagattttggaacaaatcgatcttacgaaggagacggatgatgaagaactgcaggagctaatccgcacagtattggatgaggcagcagatgaagaatatatttcgttgagtgataagatcagaatcgggcgtgagttattcaactcttttcgtaaactggatgttctgcaggagcttcttgaagatgattcgattacagagattatggtaaatggaatcgaccatattttttatgagaaagaaggaagaattttccggtctaagaagtgttttttgtctcaggagagattactggatgtgattcaacagattgtaggtgaatcgaaccgttatgtaaatgaggcctctccgattgtggatgcaaggctgaaggatggatctcgagtaaatgttgtattgaatccggttgctgtgaatggaccaatccttacaatccgaaagtttccatcggaagcaattacgatggaacagctgatccatataggcagcgtaactgatgaagccgctaactttttgaaaaagctggtagcagcaaaatataatatttttgtcagtggtggaacaggagcaggaaagacaactttcctgaatgcgttgtcgaactatataccaaaaggagaacgcctgattacgatcgaggataatgcagagttacagattcagggagttcagaatctggtgcgcttagaagcacgcggaccgaatgcagaaggagaaggggctgtaaccatcagagatttgattaagtcagcacttcgtatgagaccggatcgaattgttgtaggagaagtaagaggagaagagacagtagatatgatatcttcagcaatgttgaatggtcacagtggttcaatgtcaacaggacatgccaataatccaacagatatgttacacagactggaaacaatgatgctgatggggattgatcttccgttacaggcaattcaaagacaagttgcatcggcacttgatattatcattcatcttggaagacttcgagataagacaagaaaggttttgcagattgtagaagtggaaggttatgaagatggaaagatccagacaaaggttctttatgaatttaaggaggaggggatgaagaatggaaagatacagggatgccttatgaagaaaaatgaaatcacgaataaagaaaaactcctggctgcaggatatcacaccaactgaatatactgtcggaatcataaaatgtacggtgagatttcttctgattttgtatttgttttatgaatcgatacttccggcaattctcctgttcccgttatggttcttatacatgaaggagtggatggaagagaaagcaatcggaaaagaacaggaattcaggaggcagttcagagatagtatccagacaatggcaggggcacttaaggcaggatattctgtagagaatgcaatcagggaaacaaatcgtgatctgattggaatgtatgatgcgaatacaaggattcgaaaagaatatggtcagatggtaaggaagctggatctgaatctgtcagttgtaaccgtattgaatgaatttgcggctgaagtaaagcaggaggatgtgacgaattttattacagtttatgcagcagctaaggtcagtggtggggattcaattgcgattatcagagatgcggccagaacaatcggagagaagatcgatacagaacgtgagatacagaccatgctggctgcgaaaaagctggaatttgaaatcatgagcgtaatcccatttataatgattctctacatgaagatgacatttggtgaattcttaagtgtcctgtatggtacatggaccggatgtatcgtaatgagcatttgtcttgtgctttatcttggagcatataggtttggaaggaggattctacagattgagatttaacaagaagtggaaaaaagtacttcagcctgacaaaggaaaatatggaacctataaaaaggccggaatcgttcttttattgtcaatcgtaatgtttagtgcagtgtatgtcacagataatcatcgtcaattagcacaggatgaaaatggaaaccggattttggaaagaaaaggacagggagaaggaaaaaagacagaaaaaatccagatggagacaggcgagtggaaagagaagatgaaggttcagatttcggaaaagaagtatgcaaaagaagagattggagaacagatttctaaggcggcagaagaacttccggctcagatccttggtgaaaacaaaagtctggatgaggtcaggtcagacctgaatcttattatggaaattccacatacgggaatcagcgtgtcatgggaacttgataactacgaggttatgaacagcagaggtgttttaaagcaggagaagctgacggaagaaggaacactcgtcaaattaaccgctgtccttcgatatgaagaggaaaaaatgtcctgtgaattttatgcacacctgttttccacaccgttgtcaaagaaggaaggtgttctgaaaaagatatcccaggaagtagaaaaagcagatcaggaacagcgggaaaaggattacctgatattgccagatcaggtagatggaagaaaattatcctggaagcctgtgaaggaaatgagagcatttggaattcttttgcttggcggagtgatgattgtattccagtttacagcagagaaacaaaagcagaaagaacaacgaaagaaagaaatcaggcagatgcagtttgattatccgcagctgatcaataaattcagtctgtatataggggcaggaatgacagtgagaagagcctggatccaaattgtaaaagaatatgacaaagagaaacactatcttggagaaagaacagtgtatgaagagatgagatatacaatgaatgaactgaagaatggaagaccggaaagtgaatgctacgaggcatttggaaggaggtgcgagagtccggtttaccgaaagttcggaatgcttttaagtcagaatttgagaaaaggaaccaaaggactgacgaatctgttacaaagagaggcgcaggaagcttttgaggaacggaaaaatatggcaaagaaacttggtgaagaggcaggaacaaagttgatgataccgttgtttcttatgttggcagtcgtgttcgtgatcgtgactgtcccagcgtttttgacgattcagatttgagaaaaaagagagaaaagaaggagagatacaagatgagaaaattattgataagaaaaaataaagataagaaatatgttgccgcgatcacaacaattgaactggttttaattctggttatattaattgcgcttctgctgatttttaaagaacagttgattagtttgatcactacgatttttgagaaagtgacatcagaaagctccggcatatagcatgcggttcgtaaaaggcgaaattactgtatttttaagtttatcatttactttgttactttcatttatctttggaattctagagtctgctgtgattcaaggatcaaaaaatctcagcagaattgacacagatcgggcaatctattccgttttcggagaatatcatcaggaacttatggaacaatatcatgttttgggaattgatcttggttacaggacaggaaattatgaagaagaaaatctgatccagcgtttgcattattacaattctggttctacagatcatcaaatcaagggaattcagtatttgacagatcaatccggacaggcatttcgagaacaagtgctggcttatatggaacaaaggtatggaatggatctggttaaaaagtttaccggaacaacagagaaatgggaacagacagagacagaagaatttgatatggaaaagaaaacagatgaaatgacagatgcaatggaacgggtgaatgacagtcttgacgcatccggcagtcaaacggaaggagaagacgtggaagaaggtccaagtctgccagatgaggagaatccgtttcgtattatgcaaaagataaaaaaagaaggaattctttctgttgtgattccgaaaggaaaaaaagtatctgaaaagagtgttgatttgtcggggcaggcatcaaagagaactttgaaaaaaggatatgggacattcccaacaagaaaaggacttgatcagacaacggagaaacttctgtacaacgaatatcttctcaaaacattcggctatgcatttcggcaggattcagaacaatcagaaggaacggatgaaagtggagaaaaggaatggcagtctgatcggtcagatgctttagcatacgaactggaatatattctacaaggaaaaggatcagataaagaaaatctggaatctgtgttatttcgtctttttcttctgagaatatcaggaaattatggctgtctggcaaaggatatgggacgagtggcagaggcagaagcgctggctgtgacaatatctgcactactactgatgcctgaagcggtagaagctttgaaacagatgatacttgttgcgtgggcaggaggagaaagtgttatggatcttcgttgtcttttggatggaagaaaagttccactggtaaaaagtgcagataaatgggttgtttctctgtcacagctgccacttcttctgacagatggtggaagtgtaaggggaaatgattcaggagaaggagtcggatattccgattatatcaggatgtttctctttttgaaatcggtgccggaaattacaatgcggactttagattgtgtagaagaggcactccattccaaacatattttgtttcaggcagatcaatgtgtgactaaattagaaatacagaataagataatcgtttataaaaatctaaattaccaatatccggtttatttcggatatgaatgaagccagaattacccccggtgcagatgccctttcagaccttcttttgtacaccccaaaacgtacactcagaatcctgcaatccctcttgcaggaaacccacacactttagaaaggaaaagctgcgatgtcaaataaacaggtaaaaaataccagtccaacaagagaaagggcatctgcaccgggggtaagagcaagtgtaacaatagaagctgcatttgcagttcccctctttatgtttgcagtattaagtttgatttttttaattgaaatccagagtatacgaggctgtatccatgcagcaggaagtgatgcagccaaacaggcagcagagtcaacggctgtccttcctgtattgaatacaattcaattaaaatcagatttggtgaatctgattggagaagaaagaattgagagaagtattctgaatggtggtacatcagctatcagttgctggaagtcttattggattccgggaacagaagagataaatgttgttatcgagtacaagataaagattccggttccactaatgaaaagtccttcggtgaagttgaaagatgagtttaaagtcagtgcatggaatggttatcaaaaagatagaaagggaaatgaagacggacagattgtctatatcacagaaaaaggaacagtatggcattcagattatcagtgcagctatcttcaattatctattcaatatgttcaatacttagaattacaaaatatgagaaatgcaggtggaggaaaataccataaatgtgagcaatgtgtttatggacaggcaatgaatggtgtatatattaccaattatggaaatcggtatcacaactcattgaattgcagttctctaaagagaacaatacgtgcagttcataaaagcgaagtagcaggaagaggaggatgttctaaatgtgcaaaataatgaatgtattcgggcaaaatggaagggaaaatctatggctgttttttcaagctgttatagcagtgtatctgttgattttgtctgtgatagatattcgttggaagaaagtaagtgtaagaagtctgttgattttgcttgcgattgcagttttatgtcaggcactatgcagcaaaggagaactcaggatgatggtagccggtggattgtgtggaggagtatttctttttttaagttggttcacacaagagtcatttggttacggagatagcatattgattctgatccttggaattttatctggtggatggaatcttctttggattctgtttgctgcatttctgatcgcatctgtttacggaggaattatgatcgcacgaaagaagtatacaagaaaaaattcatttccatttattccatttctgacagttgcttatctgggaggcatgattggtggagtttactgaaaaatatacgaaaaaatacgtgaaaggaagtacagtggtagagatgtcttaccttattcctttttgcttaattctattttttctgctcatcacgatcattttttactttcatgataaggcaattttaaacgcagcggcagcggaaacggctgtgacaggagttgaaatggacagaaaaaagatagaagacgcagatctggatgcttttttccgagaaaggacgagtggaaaattgatttttctggaaaatataacaaccagagttgatctatcagggaagaaaatagaggtagaagtttttgcatcaaaaggacgaatgaagattcatctgatacaacgtgcaacgaaggtgaaaccagaagaaaaagtcagatggaaaaaatagatttctgtaaagctgaaaaagtgaagggagaagaaaatcagatggaagaaaaaaagacaaatcagcagagcagagtggcagaatctgaaatcataatagacagcgtacaaccgtatcgggagaattatcagatgcggatgcttaagaataatcggattcccggattattgagagtaagtggatgtggaatggaaggtgcaagtagatattattatcatacaggacattcacagtcgttggaaacgtattataaaaataaagatatcagagcagaagagatattaaaactgacaagacaatttctcagtgttatggaaaaaatgaaagattatatgttagaaccaaattatctgatgctttcagaaaaatatatttttgaaaagaatgaaaactattttttctgtttttttccagagaacgaaaagacctggcaggtgtcttatcatgagctgacggagtattttgtaaagaaagttgattatcaggatttggagagtattcaacttgcctgcatgcttcacaaagaaacgctaaaagaaacctatgacctggaaagcatactgcagcagtatgaggaagaagcaaaaaacagggaagaaaagtccaaagaagagaagatcagagaagaaagtaagagagaaaaagacagaagagaaatggaagaaaatcaaaacattgaggtacaggaaaacagctattataacaaggcgagagagaattatgcagtgatggaagaaaagagatatggtccgatcaagaaatttgcaaaacgctttaagtctggaaaatggggagaatgggaagatctgataacggaagctgatgactatgaatgatatataggatgtggtatagtatacgcagattcaaaaacatatcatagaagtcaaaagggagtcaggaagaatgaaagagagaccaaaagaaataatgacgatcacgttgataggaatcaatattctggtgtttattgttcttactatgatcggacggactgaggatggttattttatgttgcagcatggagcaatgtatgaaccatatattatagaaaatcaggaatactatcggctgtttaccagtctttttctgcattttggaatctcacatttattaaataacatggtgcttttgtgggcacttggatcgatttttgaaaaagaggccggtaaaattcggtttctgctctgttattttatcagtggaataggtggtaatctgctgtctttgtactggaataccatgcatgacagacagattgtatctgccggggcatcgggagcaattttcggtctaatgggagggctgctttggattgtatttgcgaacaggggaaggctgggaacactgtcaggaagaggcatgctgattatggttgtactgagtctctattttggatttaccagtacaggtgtagataatctggctcacgtaggcggattgatttgcggtttcctgacagcgttgctaacctatcgaagaaaaaatcaaaagatcctaacggtatctgatattaacgatatctgatattttacgcaggaagtgtgatcgatacgattgttccattggtatggtcagatgtaatgtcgatcgttccattatgtgcttcaatgattcttttggaaactgcgagaccaagaccggtaccgttttctttggtcgtaaagaatggttcataaagcttatcaacaatttcagtaggaataccacagccgttatcctgacattgaatcagaattttgtcgtcaagcttctttgcgcgaaactgcagacgtggggcatacttacaatcggcaagagcgtctttggcatttgtaagtatgtttaagaagacttcctctaatttggtgcgatcaccattgaacctttttatattcttatcaatactggaagtcatctcaatctttgatttttcaaagttgagagacatggcgaacagaacagcagagttgcgaagaacatgtccaagaggaaaggaagcacggtttaactggtttccattgttgagttctgtcagatcatccagcaaatcacacatatgtctggcgccatccatgcattcttcccagacacaggaacctttagcagtttcagcataaagagagctcattaattgcatagaagaataaagaacagtcataggattgcggatctcatgcgcaattgtagcaacagcagcatcatggttcttcagaagctgtgtgataatctcttttgcatctttgtttgtttccatcaggtggttcattttttcaagattgatatttgttaacataatacttactcctaatagttagattttcttgagttcggtaagagtgtagcaccaccgaaaacagcattcaataaaaatcattcgactattttcgacctttttcgacctggtgtctgaaaaatgtattctctttttctgaaaaatggtctatactacagataaaataaaatggaaagaggaaagatcatgagagatgataattgtattttctgtaaaatagcaaatggagagattccatcagcaacattatatgaggatgaggagttcagagtaattctggatcttggaccggcatcaaaaggacatgcgctgatccttccgaagaatcattaccgcaatctgtatgatattgacgaggcaacagcttcaaaagcaatctgtctggcaaaaaagatgattacaaagatgacggatgtacttggatgtgatggttataatatcgttcagaacaacgaagaggcagctggacagacggtattccatttccatatgcacttaatcccaagatataagaatgacaatgtaggtctcggatggcatatgggagaacttacagaagaagataagaaagagatacttgaaaaattaaaatagtactggagaagatatgttaacagaaaatcgcgaatttaatgagatttatgaacaatataaaaatctcattctaaaagcggcatatacttattcaggcagttatagtgtagcggaagatattactcaagacacttttctgaaactgtatatgggatatgacagcatgaagaagaaaaatatttcttcatggctgtttacaacggcaaaaaatgcggcattaaattacaggaaaaagcatagccgggagattttcgagattgatgagaattgggacagtgaagaggataccgagaaatatgaagcacaggtatacagtgcagaggaacaatttctggaagatgatcttcagaaacaaagattagagcttcatgaaaagattttcaccaatttgatggaaaagaatgaaagatggtacgatgccattgttcttgtatattacatggagatgcctcaggcaaaagcagcagaattaatgggcattcgactcgaagtgcttcatagtcttctgcacagagcaaagaaatggattaagaaaaagtacggaacggagtacgaagaaatgaaccgggaagactaagagcaacaccaaatgtttactgctcaatgtacaaagaaaagtatataagaaacagtggtgctgatagtttcccggtatctttttgaatactgtagttttatgaagactgttgccgatagatgaactatattattttgcggcagcttcttcaatgaggccgataatagtagcaatcggatcctgctgcccagaattgtgcattgcatttatgaactgctcacggttttcgtacaggttatgaactgcatccaaaagcgttgcattcgtaagctgttcttcctcgattacaagactgaatccctgacgttcgaaagaatgtgcgttaagaatctgatcgccacgacttgcacgggcagaaagcggaatcagaagattcggttttctaagagcaagcagttcacagattgcattcgcaccggcacgtgagataacaacatctgcaagagcaaagagatcacgcagttcgtttttgatatattcaaactgacagtagcctttgatttctttcagagaatgatcaacctttccttttccgcagagatggatgatctggaactgtttcagcagttcgggaagggcagcacgtaccgcctcgttgacagctacagcaccaagacttccgccgattacgagaatgacaggtttttcatctgtaaagccacacatctttctggcagcatccttatcaccagtaagaagttcctgacgaatcggagaaccggtaagaactgcttttccctccggaagagcatctaacgtctccgggaagttacagcagactttgacagcagatggaattgccagtttatttgccaggccaggtgtcatatcagattcatgaataatgaccggaactttgcatcgctttccagcaagaacaactggaaccgaaacaaatccgcctttagaaaaaataacatcaggctttaagcctttgattaacttacgggcttcaccaaagcctttgattacacggaatggatctgtgaaattctgcagactgaaataacggcgcagctttccagaagaaattccatgatatggaattccaaaaggttcaatcagttccttttcaattccattgtaagaacctatgtattgaatatcatagcctaattctctaagctttggaatcagggctatattcggagtgacatgtccggcagtaccgccgccggtcaatataattcgcttcataaattaacctccagatttagtgtagagtgctactgttcgaagtaaattaagaacactagccttatagcatcatattacccttatttgaaaaaatgtcaagaaaaacgggacacacaaactggagagaataaggtaaagaaaatgaaaaaactgaaaaaattatcattggaaaatgaaatgaaaaaagaagctgaacagattgaaaagaaagtccgagaggacaaatctctggatgacattacagtgtctgatgagatggaaaaagagcttttcaataagattcaggattacgaatacgacaagaggcataaaaaagtcgtccgcaaaaagaagaaaagcaagtttgtaatcggagcactggcagcagtgctgattctggtgtgcggaagtgtgatgaccagtgtggggagtaagtcgtattggaagacgttgtggaataaagaggcaggggatgagactttgtcttatgtagatgttgaaaatatggagacgatggaaacggaagatattgatgagttggaagttgataaagaaattacaaaagtaatgggagcatctttggtgaaaatgcagtataagccggaagatatggtgctaaaaagatatataatagataaagaacaaaggatggctgtattattttatcaatacggagaagaagtaattaaatattatatgtataccaattcaacagattcatcatttggagaaaaaacggttgatcaattattagacgaatatgagtttcaaaatggaaagcatagtatattagtaaagcaatatgagattaagaattcagataaaagaagatatattgcagagtttgaatataagggtatacattatcagattaaaggaactatagaaaaagaagaatttgaaaaaattctagaaaatttattttttatataaaaaacgcgtaagtattttccttctcagttgtttacttatcagaagacaataataaaagagggggaagatagtcttatgataagtaaaaaaattgcatcagttataacaagtgttatggttttctgttgtgtggtaggagtatctttgacaaatgttaaagcagacgacagtgctccaaagtcagttgatggctcatatttgacatcagcagattcgtctacaggttatacaccgaaaaataatgagagaggagaacatctgatggatggtcagtgttcaatctcaaaaacaggaacaaaaagaatctatgcctatggatcaacaactgctaatcatacagttgacgttattgcggttattgtttatgtagataaatataatgagaaagacggaaagtggcatcagattgatgcattttcaaagaaagtagagaatgattactattcggcaatctcgaagtcaattcaagttgacagaggatattactatcgagttcatgcttctcacattgtatgtatggcaggttctccggatgaagaaacattctctgtaaccaacggcatcctagtcccataagcatctttctcccacaccaacggcagaagatgcagcccgtgggctggcctaacagccgctgcgcggtggttcgctcggatactcacaaattagattctaatagataaaagtgagagccttgttccttgatacaccacaattgaataaatgagcatataatcaccataagcggctgttaatcagtccatggactagtagggcagaagggaaggattgaatcaagagtagcgatccttccctattagtttgccattttttaagttattttcctgttgcttctttcagtgcctgagcaagctggtccgggcaggaagttttcttgaatccacactggattccttccaggcgtgagatggcctcatctacatccattccttcaaccaggtgggaaattccctgcaggttaccgttacatccgccaacgaaggaaacattatgaatcttgttatcttcgatatcaaagtgaatgctctgggaacagacaccttttgttctataatccatatctagatatcctttcttttaaatttttagatcttttagttaccttttgaattatagcaaatcaaatataaaaaaacaatttttcttttcacatctttcagcataattttcctcaatacgacaattttgatttttgctgtagaaatctgtagaacgatttatgcggacagaatataaaatcaggtttataatatctacaaacgtaacgaaggggaggcccgaacagttacgcgcaatatttttaaaaccaggaggggttgctatgttaagagaactggcagtgaacacaagagtcatctattatctgatggcgcttctgggcataatcggagtgctggcaaaagcagtgaatcagcagacattgaatcagatgctgaaggcggcagggaatatgtccaagagtacacaccgactgataaaactcgtaagagcaaaatacgaacatgcatgtatggtgcatgacagtgtagagaatacgaatgcatttgtggagaaatatatttatgaatatagaggatttttgtttgggattcatacctggagacagatggaattgctgacggtgtggtttgttggaattcttgcagctcttggtgcattcgaaagttatattacttatggattttcagatgcggcgtatcaatatatagaaacaggattagcggagatggtactcctttttgttatcagtcatctttcggacgaacagtacaagcttaatgctgtcaggatgtatatggtggattatcttgagaataattgtgcatttcacgtaaagagacagcggactacggatagagaagaattgaatgtgatcgctgcagagaataccggaaagcaggagtgggaagaaaagaaaggggaaagagagattcacagagaagacaacgtacagaatggaaataaaacaaaagcagagaggacggagctgccgatcaatatcgagggagaagcaagatcggtagagccggcaaggaatccgaaaggaaattcagagagagacgtagatagagattcggagcgagattcaggaagaaatgcagaaagagaagcggcgattcgtcagattctggaagaatttttaacataacgaaaactaaaatttcttgagcagcatttgtaaataaggtataataaaaagcagttggtagccgccggtcatggaatatcaggaatggcggcagggaaagaagaaccaactgcttttttagggcttataaacaagaaaagaaagtaactgattaagacaggtgcaaagagtaataggaggagttgctatgttaagaataggaatgttgaccagcggtggagactgccaggcacttaacgcagcaatgcgcggtgttgtaaaaggaatttgcaacaagcgcaaagatgtagaaatctatggatttaaagatggatacaaaggtctgatctattcggatttcaatatgttgacatcaaaggatttctcgggaattctgacacagggtggaacaattcttggtacatcccgtcagccgttcaaactgatgcgtgtgccggataaggatggaatagacaaggtggaggcaatgaagcacacatatcataagcttcatctggattgtctcgttattcttggaggaaatggaactcataagacagcaaatcttcttcgtgaggaaggactcaatgtagtgacactgccgaagacgatcgataacgatctgtggggaacagacatgacatttggattccagagtgcagttgatatcgcaacagatacgattgacagaatccatacgacagcaacttcccacagtcgtgtatttattatcgaggttatgggtcacaaagtaggtcatgtaactctgcatgccggaattgcaggcggagcagacataattcttcttccggagatcccatatgatattaaagcaatcaagaatgtgatcgacaaacgtacacaggcaggtaagagatttacaatccttgctgttgcagagggtgcgatttccaaagaagatgcaaaactgaaaaagaaagaatacaaagagaagctggcaaacagaaaatatccttctattgcttacgaactggcagaacagattgaaaaagagacagacaaggaagttcgtatcacagttcctggacacacacagagaggtggcacaccttgtgcttatgaccgtgtatttgcaacaagagtcggagcgaaggcagcagaattgatcctgaatgaagaatacggatatatggtagccatgagaaatggtgagacagtgaaagttccgttggaagaggttgcaggaaagctgaaatatgttgatccgaactgtggtctgattaaagaagcgagaacaatcggtatcagcttcggagacgaggtgtaattcatgtcatatacggcgctatacagaaagttccgtccttctgaattcgaagatgtaaaaggacaggatcatattgttacaacgcttcagaatcagattaaggcgaacaggatcggacatgcgtatctgttttgcggaacgcgaggaaccggtaagacaacggttgcgaaaatatttgcgaaggcagtaaactgtgagcacccggtaaatggaagtccatgcggagagtgtgagatgtgtaaatctatcgctgccggcacttcaatgaatgtgatcgagatcgatgctgcatcgaacaatggtgttgataatatccgtgagatccgggaggaagtgacatatcgaccgacagaaggtaagtataaagtatacattatcgacgaggtgcatatgctttccatcggagcatttaacgcattgcttaagacacttgaggagccgccggagtatgttatttttattctggcgacgacagaagtgcataaaatcccaattacgattctttccagatgtcagcactatgatttcaagagaatcagcattgagacaattacagaccgtatgcgtgatctgatgcagacagaacaggtagaagtggaagaaaaagcacttcgctatatcgcaaaggcggcagacggatctatgcgtgatgcactcagtctgctggatcagtgtattgcattttatctgggacagaagctgacgtatgatcatgtgcttgaagtacttggtgcggtggatacagatgtgttcagccgcctgcttcggaaagtattggaaagagatgttgccggagttcttgatatcgtggaagatctggttatgcagggacgtgaactgacccagctggccgcagattttacatggtatctgagaaatttgcttttggttaaaacttctgataatatagaggacgtgctggatgtgtctacggaaaatatgctgcagctcaaggaagaatcaaagatgatcgaacttgatatgctgttgcgttatatccgtatattctcagaactttccggtcagctgaagtatgcaacgcagaagagagtacttctggaagttgcactgatcaagctttgcactccggcgatggagactggtcaggatgcacttctggacagaatccgtgcggtagaagacaaagtagagaaaggacttgctgcagccgcagatatgccgcagcgagttgtttacgtgaatggagatgatgcgtcatcatccggatcaggcgttgcgggaagcaggaaggcgaaaccggagctgccgaatgcaattccggaggatgtgcaggaagtggtgaagaatttccgttctatcgcagatgaagcgtcaggtatgatcagaggctttcttaaaaaagcaagactgagtcttggtggtgacaatcgtttgctgattgtactgccagatgctatgtcggcagatatggttggcagagaagatcatgtgcaggaacttgaacagctcattgaagagaagattggaaagaaagtcgaggtagatgtccgtcatgtagaagagggcagacactttgaggatacatttgtggacatagaacagaaaataaatatggaaataacagtggaggattagacatggcaaagcgtggaggatttccaggcggcggaatgccgggaaatatggcgaatctgatgaagcaggcacagaagatgcagcgtcagatggaagagcagcagaaagaacttgagacaaaagagttcacagcagctgcaggcggcggagcagtagaagtaactgtatccggcaaaagagaagtaacaaaagtaaaacttgcagaagaagttgtagatccggacgacattgagatgctggaagacctgatcgtagcagcgacaaatgaagcactgcgtcaggttgagcaggagacaaatgcagcagtatctaagatgacaggcggatttggcggtcttggaggcggaatgttctaatggattactacagtaatcagatcagccgtctgatcgatgagttctcgagacttccgggaatcgggaataaatcagcacaaagacttgcatttcatgtgatcaatatgccggtagagcaggtagaaggacttgctaatgcaatcgtagatgcccgcaagaatgtccgttactgtaaggagtgctgtacgttgacggataaggatatctgcccaatctgcagcaatccggacagagatcataagacaatcatggtagtggagacaccgcgtgatctagcagcgtatgagaagaccggaaagtacaatggagtctatcatgtacttcatggagcaatttctccaatgcttggaatcggtcccggggatatccgtctgaaagaattgatggagcgtctgcagggagatgtggatgaagtgatcattgcgacgaattccagtctggaaggcgagacaacagcaatgtatatcagtaaacttatcaaaccggtcggaatcaaggtgagcaggattgccagtggtgttccggttggtggtgatctggaatatattgatgaggtaacactgctccgggcattggaaggaagaacagaattgtaaaagcatttgggattatggatgcactccaggatatgaagtataaagtacccggagatgtctcggttatgggatgtgataatactttattttccaaagttaagaaagtgtcacttacaacgatcgagcattttgtagttcacaaaggaatggatgcctgtgatatcatcatgaaaaagatcagttcaagggactggaagtatacggaatttgaaccggtcagtatttatcatgtggaatatgagccacagatcgtggttcgtggaacaacgtcttatgcgaagacaaaatagttgatgtatagacgctggattatttaaaattaataaaaaataataaaattattactaataaaaacaacaaaaacaaacgattctgattttagaaaatgttgataaagcctttaaaataaagacttttatacagaagagaaacaattgatattaactaatattaataaaaacggttaatatgtcggattattaagtgaaaaatgactattaataatttttcagacagttgacctcaggttttggaagctatataatcagctcataaacaaacgaattactgctggaaaaacagtgagttgtatcagtggtaagaggaagattcatgtataggaggacttaaaaatgaaattttttatcgacacggctaatgtagaggatatcaagaaagcaaatgacatgggagtgatctgcggagttacaacaaacccgtctctgattgcaaaagaaggacgtgtttttgaagaagttatcgctgagatcgcatctatcgtagacggaccgatcagtggagaggttaaggctacaacaacagatgcagaaggcatgatcgcagaaggacgtgagattgcaaagatccatccgaacatggtagttaagattcctatgacagtagaaggcctgaaggctgttaaagttcttacagcagagggaatcaagacaaatgtaactctgatcttcacagcaaaccaggcacttcttgcagcaagagcaggagctacttatgtttctccgttccttggacgtctggatgacatttctacaaagggagttgacctcattgcagagatcgtagagatgttcgaagtagcaggaattgagacagagattatcgcagcaagtgtacgtaatccaatccatgtaacagaatgtgcactggcaggagcagatattgcaacagtaccttacaaggtaatcgagcagatgacacatcacccactgacagatgcaggtatcgagaagtttaaaaaggattatattgctgtttttggtgagtaatccgggaaataacgttaagactgaaaatggaatcagaatggaaattaaaaaggagatatcatgaacaagttagagcttatgaaaactgcgaatgagatccggaaagggattgtaacagcactgcatagcgcaaaggccggacatccaggtggatctctctcagcaacagagatttttacatacctttattttgaagagatgaacgtagacccgaaagatccaaagaaagcggatcgcgatcgtttcgttctttctaaaggacacacagctccgggattatattctacacttgcgcagaaaggattcttcccgaaggaagatctcgtgacacttcgtcatacaggatcttatctgcagggacatccggacatgaaacacattccaggtgttgatatgtcttcaggatctcttggacagggaatttcagcagctgtaggtatggcaatcgcaggaaagcttgacaatgcagactacagagtatacacactgctcggagacggtgagatccaggaaggtcaggtatgggaggcttccatgctggcagcacatagaaaactggataatctcgttgttatcgttgataataacaatcttcagattgacggagcaattacagaagtcaactctccgtacccgatcgataagaagtttgaggcatttaatttccatgtaatcaatattgatggaaatgactttgatcagatcgatgctgcattcaaagaagcaaagacagtcaaaggacagccgacagctattattgctaagacagtaaaaggaaaaggtgtatccttcatggagaaccaggtaggatggcacggaaaagctccgaacgatgaagagtacaagattgcaatggaagaattagagaaagcaggtgaagcattatgtcagaagtaaaaaagatcgcaacaagagacagctacggtaatgctttggctgaactcggaacagaacatgataacgttgtagtacttgatgccgatctggcagcagctacaaagacaggtgtattcaagaaagcacatccggatcgttttatcgattgtggtattgctgagtctaatatgatcggtgttgcagcaggtcttgcaacaacaggaaaagttccatttgcaagttctttcgcaatgttcgcagcaggacgtgcatttgagcaggtaagaaactctgttggatatccacacctgaatgtaaagattggtgcaacacatgccggaatctctgtaggagaagatggagcaacacatcagtgtaatgaggatatcgctctgatgcgtacaattccgggaatggttgtaattaacccagctgatgatgtagaggcaagagcagctgtacgtgctgcttacgagcatcagggaccggtatatctgagatttggacgtctcgcagtgccggtgatcaatgacagaccggactacaagtttgagcttggaaaaggtgttgtgttaagagaaggaaaagacctgacgatcattgcaacaggacttcctgtaagtaactgtctggaagcagctgagaagcttgcagcagacggaattgatgcgaaagtgatcaacattcatacgatcaaacctctcgatgaggaacttgttgtagcagctgcaaaagagacaggaaaagttgttacagttgaagagcattccgttatcggcggacttggaagtgctgtatgtgatgtactctcagagaaagctccgacacaggttatgaagatcggtgtgaatgatacattcggtgagtctggtccggcacttgagcttctgaagaagtatggtcttgatacagacagcatctacgagaaaatcaaagcatttgcaaaataatctgtaactgttcagagccaagcaaaatttcataaaacaggtgtaaaatgcttgcatttttaagactgtttttgaaattttatttggcggatacgccacaccgacgaaatgcgtagcattttggaggttggctctgaacagttacaataatctaataaaaagaacgcttcgcgctttctgtttacaggatatctgcaatcagagagtaccggagcgttttttgatgtttggagatattaagaaaatgccgtgcacgaaaagtaatatttgtcgaacttacctgacactaattgataaaatctcccgatttccttgtgctatgttaagggcaatccccgggaaattaaataaaagtgatagaaaggtgagtataaaatggagagacagattccaaaaaatgtgcgtcagataggaaatgtgagtgatagtccaaaaatctatgtggaagattatgtagatactttttttcttcagttaagtgaaaaaagcgagaaagaaaaacaaccagaaggagcctttctgattggtgaaatgcagaagcaggacaatgaagaatatatttatatttatggtgcgataaaaataaaagagttaaaaaaggagggcggtgaatacctgatcaatgacaagatatggaaatgtggttgtgaagaatgcagccagtattttgaagaaggagaaattataggctggtttgtgacagagcatgatttacagctggctccgggttctatcaacgtaaagctgcataaaaaattatttccaaagaaaaataccgttcttgttatgaaagattcgacaaaccaggaagatgtattttttgtacataagctgggagatctgatggaaattggaggacattatacttattacgagaagaatccgtgcatgcagaattatatgattgcaagtcgaaaaaaaaatggggcagttcagacagaaaatgtggaagatacggctgcacaaagctttcgttctctggtacgtgaacggggcggtcagaaaagagaaagaaggacaggcagtctgatgtatggaatcagtacatgccttgtactggtcctgatcgtgatgggtgtttctatgatgaataatttcagcaaaatgaaatccctccagaataagataaatgtggttgccgagggggaaaagcaaacatcctcacctgatgtgaaagagacgagtggagcagcagctactgtggagaaaaatcaggaagcagcagatacagaaaaggaatccgcagagataacggaagaaaatgaaggggaagaacagacggaagataagaatacagaaagtgttccggtttccgggactgccgttgcagcagatgaaaatgatggtatttatgtggtggaaaaaggagatacccttgcaattatcagtaaaaaaatgtatggagatgttaatcatgtagatgcgatcagccggatgaatggattgcagaatgggaacctgatctatattggacaaaaattgatattgccataaatccgtgttatactgtgaaagacaagtgaaagctaaaagtgtatcaacagaaaaaggtgcactggacaaacgataaggggagcaatatggcgcgaaagaaaatgtcgaatttacaggtggtaaaaacgcaggatgatagaaaagcgctgagacaaagggaaagaaggatcaaacgccggagaagaaaagaacttcttacctatatcattctgattgcgatggcaatctgcggaacatacctccttttagatagtaagacttatggcacagtccgcaaggcagacagttacgcgaaagacctttcggacaggaataattacgttcagtttgcagatggaattgtgcgttataatcatgacggtgtggtatttctaaataagaagaatgaggaaaagtggattcagccaacacagcttcagacaccggtgatagttgtgaaagacgatgtgtttgcggttgctgacagcggaggcaacagtattctcgtatttacaaaaaatgggttgaaaggtgagattcagacgacattaccgattgagagaatcgcagtatcgaatcagggaattgtcagtgcaattttaaaagatgagacttcaccgaagatcatatcctatgatgcggcaggaaatattctggtagagcagcagattacgattggaaatacaggatatccgatcgcattggatttgtctgatgatggaaaggttctggcagtttcttatctttataccaaaggaacacaggtgcagagcaggatcggatattataattttgatgctgccggcaaagagaaggcagataacaaagtgacagcagatacttatgaagatatgctgatcggcgagattttctttatgggaaatgacagatccgttgcagttggagataatggatttgagatttatacaggaaaagatactcccaagcagacaaaagaagtgaaggtgaaccaggagataagaagtgttttccattcggattcttattttggatttgtcctgcttaatcaggagaagtcagggtatgagttgagaatgtataatcaatcaggagatactgtgttcagtagagaaatacagggagattatagtcatgtaaagatggatggagacaatatcattctgtatgatggaagtaagtgctgtatttatacaacgacaggaatcctgaagtttaagggagacctgggagcagatgcgcaggaaatctttgacgcatttggcctgaacagatactatgtgatgagtgataatgaactacgaattgtttatttgacaagataggagagatatatggagaattggttgttacttgcagtcgggattgtgtttttagtctgcatgattgccggctttgtgaagggatttctcagaattggtttatcccttctgtcaacaatattgacactggtactggtgtcattcctttccccatacgtgtcggatgcgctgatgaagcatacaccggcgcaggacgtactggagaagaagatagtggaagcatttatgccagagctttcagcagatgatctgttgaaagcgaatctcagtggaacacctctggagaatttaacggtagaccagattaaatcattaagcgaatctggatgggacaaactggggataactgcacaggatatcctgaaagtggtcggagatcttccaaaggatacacagatccgtgagattgagaattcaatgctgccacagtttttgaaagatgcattgctggaaaataataatactgcgatttatgaagaactggatgttacaactttcccagaatatgttgcggcctatatttcacgaatgctcctcaatgttgtgtcatttcttgtgacatttttgattgcgatcattcttgtaagcgcattgatgtatgcggtgaatattattggtgaacttccgttacttggtgcgatcaatcatctggcgggaggagtgcttggaattggtctgggatttattatcgtatggatcgcattccttgtgctgactctgatttatacgacagagattggaacaacgtgttatgcgatggttgagcagagcgcgatcttgacgtttttgtacaaccataatccgctgttgatctggttacttggattccggtaggaaaaataaaagaaaaatattaaaaatagggttgacactctcgataagctatgatatcatatagaagttctgttgaggacatatatatgggggattagctcagttgggagagcgcctgccttgcaagcaggaggtcacgagttcgactctcgtattctccactaggattacggattgtgcgttgcacagtccgtttttttgtatattaggaaagttctttcctaatatacaaaaaaacgctccgctagggatacgccacagcgatgaaatgtgtagcattttagagctactggataaggaaaaatctgacaagctgtgtcagatttacgcaacaaaaaaacatcccacagcgcgaaatctgtgagatgttcttcctaactccccctgttggacttgaaccaacgacacttcggttaacagccgaatgctctaccgactgagctaaggaggaatatttccttgtcttatcgacgaaaaatatattatcatatttaaatggtctttgcaagagaaaattttaaaaaatgtaaaaaatcttaaagaaatctaattttatctctttcaagtcataatcagaaatccagggacatacatatattagacaggagggctgatataaaatatatcaacagcactttctgaaaggtaacaattcaatttaagacaggagagggtaagatgcgaagaaagttaagaagacatcttgcatttctgatggcggtactgatgatgctgtcgttgatgggtgttcaggtactggcagaaggtgtacaagttgaggctgtacaaaccacagagggaacagattgtaccgtgctcccggaagaaacagatgcggaagagacttcccaatcagaaatgcagaaaccagacgcaaaagaatctccccctgagtctggagtagtaacagaggaagggaaaagtaccgattcagagaaaatttcagttgctcttaaagatgagattcttacaaaaggttctctgacagcagaggttagtggaacaacagaatcagatcagattgcttatcagtggcaggtaagtgaaaatggtcaatggaaagacattgaggatacagcgactgtggatagtagaaagcaatcctatgaagttgcaagagatggtgcacagaagacatttcgtgtgaaagtgacagtaaatgaagcggtgacagtttattcttccgaatacaaggtgaattattatgacaagcttcagaatggaagttttgagacgccaaaagtatgtgatgcaggaacactgacttataagaatgcacattttatccaggtagcaaatggaacgaatgatttatattggaaaacaacagcgaaaggtgcatattttggctctggaactcagagagattattatatcgagattgcagatggaagccgaagttattatggaaatacggttaatgatccaaaaccggtttataacatcagcagtgcggcacagggaaatcagttcgcagaattaaactgtgaggaaccaggggctctttatcaggatgttttgacagaaccagggacagttcttcactggggattggaacatgccggacgctggggaacagacacgatggcggttatcatcagtgatacgaaatcaatgagttctgattggaatccggcaggatctggatttgatcagagtaatcctgatgtgcaggcggtattgtcagataaaactgggaaatggacttatcactatggagattatacagttccggcagggcaatatgttactcgattttattttgtggcagtagcggcagcaaatggaaatctgtcaaatggaaacctgctcgataacatttcttttggaaaggatcttccaaacccaccggccaaaacaggtaatctgataatcacaaagcaggtggaaggaattgcagcaagtcagattccggacgagtcctttacatttcagataaaacggggagaagaagtgatcgaagaagtgcagattccgcaaaatggtcagtggagtgcatcgctccaggcggttgaacctggggaatatacagtgacggagattgctcaggaacagaataactataggctggagcataccttttatctcgtgggacaggaaagtcaggcagaggggatgacagcacgaattgatgtaacgaaggagcagacggcaacagtaacttatacgaatcagtatcaaccgcttatggttgttccgacaggagtagagaacaggatgtttcctacaatcctgatggaaacagcaggtataacaggaggagcagtttttctgtttcttcgaagaaagaggaaagaaaaagattcatgaaattaaaaggagagattcatctttttctgattcgtcttgcatttcttctggtgtttctgtgggttttattcgggctgttgtttgggattacaaccatgaaaaacaatgacatgtcgccacgcatcagtgcgggagatctgctcttttattatcgactggaaaaaccgaaaagcggggatgtggtggttcttcagaaagcaggagagaaatatgtgggcagagtgatcgcagccggcggcgatacagtagagattacagaggacgaaaaggtaaagatcaatggaagtaagattgtggaaaatgatattttctatgatacaccgcaatacgaaagtgacacggtctatccactgacgctgaatagcggagaatattttattctgggagatcaacggggaaatgcaaaagacagtcggtattttggagctgtgaaggacaaggagataaaaggcagagtaattacggtgctccgccggtcagatatctgaaacccggaaatcagagtaaaaagtgaggtagagattatgaataagaaaacagcaggacgtatttcagcaatggcaatggcgagtatgatgatgatgtcagtttgtgtggtaaatgcgtcagccgaggaaaatgagccaatcacacagctgaatttgaagaaaacggtgacaacggatggaaatacataccagccaaatacatcattttcgtttcatgtggagaatggtgaagcagcagaaaattggagagataatgtagtatatgccggagtgacaggtggaatcacggcctctcagacaatcggattccagccatcaggagaagatacactggcagcagcttacagcaagaatgcaacattggaaattaatacagaggtatttgaacatgctggtgtttatcattatgttgtgactgaagatgcaggctcttatgaaggaatcgattatgatacagcaggcagagatgtttatctttttgtatataacggagcagatggagcactttatgttggaaatgtaattacagaaaataatggtgaaaaaggtgatcttgaatttatcaatgattatggtgcagaaaatgatacaacgcatgatgtgacgatcaaaaaaacgatcacaggtaatcagggagttaaaaataaatccttcgaattcaaggttgcggtgaatggtggacagggagaactctacaaagttgtagtgaagaaaaatgcaaatgcacaggcacttacagaatacatcacaagcaatgaagcagaaacttcttatcagatttctgatacaggttcaattacaatttatggattgacagaatctgataaatacacggtaacagagaccgatgcgaataaagatggatatactactacgattgatggagaaacaactgcgaccggaacaaagacaggaactacaaaagaagatggtacagtagttcagtatgtgaatgagaaagatgcggctgtagtaacaggcgttgcaaagaaatacacaccatacgtattacttgtgggtgcggcaggcgcatttggatcagttttctttcgtagaaaaagagcatgataaacgaaacgacagaaggtcaggaggcaggggagcagagggaagagctgttttttaaagttatagaagcgggaaataagatattggaaattctggcagcgctctttattattcttatgcttctttatggtgcctattcattatgggacacctgccagatcaaccgacgtgcgtttatcagtggagaattgatgaaatataaacctgcagggaaaacggatgaaagtccgtccctgcaggaacttcagaaaatcaatccggatgtgtgtgcctggctgacggtagacggaacaaagattgattatccggttgtgcagggagaaacaaatctagaatatattaatcaggatatttatggagagtttgctctttcaggaagtatttttctggatagcagaaatgacagaaaatttattgacagttacagtttattatatggtcaccatatggataatggcgcaatgtttggggatgtgatgaattataaagaaaaggagtattttgaatcgcacaaaacaggtacgctatatttgaatgaacagttagaaaaaatccagtggttcgcctgtgtggagacggatgcgtatgatgaagttatttataatccacaagattataagaaagagaacctagaagaactgatggaatatataaaggcacatgccgtgcagtatcgtcttcctgagaaaaaaggaaaagaggggtggaacaggatcattggcttatctacttgttctaacgatcagacgaatggaagagtaatactttatggatttttatatgatattactgttcactcccgtgtcaatcactccgctgattgacacggaggatgcgtgttttgacttgaatgcatctcgccccatcgccaaaggcgatttaaaatggcgagatgcgttgctggtcgcacatcgtgtgaacagtaacaggtagataaagaatgatgtagcgcaacgtcgttgcatatttgtctgttgaatgttaaaatgtgaatgtcattcaggttcaggtcaaagctagaaaaagagcgaaaatggatctggataatttcgaaaatcagggaaataaaggcaggcagtatacaatgacgataaaagagattgcgcagatggccggggtgtccagcgcagcagtatcaagatatttgaatgacggatatgtgagtgaacagaaaaaggagcagatccgtaaagtgattgagaagacgggatatcagccgtctactcaggcaagaatcctaagaaccggacgtgcacatctggttggtgtggtggctccgaagatcaattcagaatcaatcagccggatcacagcgggaattgaacaggttctttcggcaagagggtaccagatgcttcttgcaagcacggataatcagccaaagaatgagctgacttatctgagaatctttgaaagttatccggtagatggaattgtactgatcggtacagtgcttacagacgagcatcggagatttttaaaagaatcaaaggttccggttgtggttgtgggacaggagacagaaatggcaagctgtatctatcatgatgattttggtgcgggaagagcaatgggacaagaagttgcggtgaaagcactgaagcggaatggtggaagacctgaagattgcaagattgcatatattggtgttactcgtgaagataaggcagcaggtgctgccagagaagacgggttccgcaagggacttcaggaagcagggattactttcgatgaccatcggtacagacgcgaatcagaatttacaatgagcggcggatatgaagcagtagtggatttgttgagtgaagaaaatggaatcgatatcatatcatgcgcaacagatacgattgcagcaggagcaatcgaggcattgatcgcacagagtaaaaaggcggttccggagtcggttcagaattctggtgcaaggatgctacacattttggaacagtctggtatctgtgtcacaggatttggtgataatcagatgttaagggctgtgacaggcggtattccaacggttcattttgggtataaaacgagtggaatcaagggggcagagctcttgcttgaacagattgaagagaaaaatccggtgccggtgcatatgaaactgggattccagatcgtgaataggtttgaatgaacgtaactaagagtatagtgcaagttaaacaaaacagaagaatcagaattagtaaaaatgccatctttacaaatggcatttttttatttaatataaaatcataagatgtgaaaacgattacacataaaacatagaaggaagggagagtaatcatggattacaggaaaacagcccaggagattctgggatatgtaggtggaagtaagaatattgtatccgcagcgcattgcgcaacgcgtcttcgtcttgttatcgcagataatagtaaggcagataaagaggcaatagagaatgtggatggagtaaagggagtatttgaggcatctggacagcttcagattattcttggaacaggaacagtgaataaggtgtttgatgaatttatcgcgatcgcaggtattacagcaagcacaaaagctgaggcaaaggaagcagcggcagagaagcagaactggtttatgaaggccatcaagctgttaggtgatatttttgtaccgatcattccggccatcgtagcaagtggtttcctgatgggaatcatgaatgcgctggatttcatgaatgcaaatggatttttagcaattgatacaagcagttctatttatgtgtttgcgaatctgttcagtaatatcgcttatacatttctgcagattctgattgcattttcagctgcgaaagcatttggtgcaaaccagtatcttggagctgttatcggtatgatcatgattcatccgtcactgcagaatgcatatacagttgcaacagaaggtgtacagcagacacagagcgtattcttcggactgtatcacatcgatatggttggatatcagggacatgtaatcccgatcattattgcagtatggatcctttctgtattagaaaagaagctgcacaaggtggttccggcagcacttgacctgtttgtaacaccacttgtcagcgtattcgtgacaggatatcttacactttccattataggaccgatctttgtatggggtgagaatgcgatccttggagcaatccagtggatgctgacacttccgctcggacttggaagtctgatcatgggaggtttgtatgcaccgacagtagtaacaggtattcatcagatgtacacagccattgatattggtcagctggcaaaatacggagtaacttattggcttccacttgcaagtgcagcgaatgtagcacagggtgcagcagcattggcagttggcgttaagtcaaaagatcagaagattaaatcccttgcacttccgtcatcacttagtgcatttatgggaatcacagagccggcaatctttggtgtaaacttaagattcttcaaaccatttatcgcaggatgtattggtggaggatgcggagcattgtatgcatcacttgtacatctcggagcaaaaggaactggagtaacaggtatcttcggtatcctgctttgcctgaatcagccgcttcagtacattatcgagatggcaatttcagtaggagtagcatttgtgatctccttcatgatttacaaagataaagagccggtagttaagacagccgcaacagagacaacagttgagaaaacagaagagacagagaatgtagtagaagcagaaaatgtttcagcagaagaaattacaagcccggtaaacggaaatgttgttgcgacagcagaagtagcagatgagacatttgcatcagagatgcttggaacaactgttgcagttgagccaacagatggaaagattgtagcaccatgtgacggtgaagtaatgaatatcttcgatacagggcatgcagtatgcatcgcaacggaagcaggagcagagcttctgatccacattggaattgatacagtttccatggatggaaaaggatttgtaaagaaagtagcagacggagcaaaggttcgtaagggcgatgtgctgatcgaagcagatctggatgctatcaaagcagcaggacatccgacaactacgatgatgatactgacgaatgcagatgacttcagcaaagtagagaagacagcagcgggaacagttacaacagctgatctcgcaatgaagattgagaaataaattgaacagtgattaaaaagatacagccgttttattcaaagaagaattcttgcagaatagaacggctgtaaatggaaaaagggagacaagagcatgaatgcattaacaagggatctgattaaactggtagatatgacggaagagatgatgaaagaaaaagggcagaaagaaggagcggattatcgtgagaagttgcatctgatgcctcctgttggctggctcaatgatccgaacggattgtgccagttgaatgggatctatcatgcattttttcagtattctccatttaatgccgaaggcggcgtgaagatgtgggggcactatacaagcaaagatatgatcgactgggaataccagggagtaaagttatatccggatcagccatttgactgtcatggtgtatactccggatcagcatttatcgaagatgacaaaatgtatgtttactatacaggcaatgtaaagctggaagacggagattttgactatatcaacacaggacgcgagtcaaatacggttcttgttgtcagtgaggatggaaagacatttggatcaaaaaaagaactgatgagaaatgtggattacccgtcagatctgacttgccatgtgcgcgatccgaaggtgtggaaagacggagatacttactacatgattcagggtgcacgtacaaaagaagatgtcggacaggcattgatcttcgagtcaaaagataagattaactggaagttcagaagccgtgtggaatcagagaaaccgtttggttatatgtgggaatgcccggattactttgaggtagatggaacaaaaattctttctgcttctgtgcagggacttgaaggcggagtatgggatgacagaaatgtttatcagtcaggatatttcatggttgatggaaatattttagatgattataaactttcagaatacatgctttgggattacggatttgatttctatgcaccgcagagttttgagactgaagatggaagaagggttcacatcagctggatgggaatgccggattgtaaagaatatactaatctgacgatcgcagaagggtggcagcactgcttcactttcccgagagaagtatttgtgaaagacggtaaagtttgtcagagaccggtcagagaattgcaaaagaggaaaactcttgtggataagtcagccggaatgttgaaaaaagatggatataaagtctatgatgtgaatatctcgggcattcagaacaatgaattcaggacagtgattgatgaagaattgattcttgagtacaaaaatggaagatttgagatgcatttcacaagtcaggataaaaattctgtatctgcaggaagaggaatgcgttatgttgatgtagataaaatttcaagtgttgaaattcttgtggataaatcctctgtggaagtatttgtaaataatggagagtatgtattcaccacacggttctatccacagaaagacagtcttgcggtagaggctgcgggagcagaaatcatgatggaagagattcgatagttgaaagaaaatagcctccggactattgaaaaaaacttttagtagaattataataatagtcacagattccccacagatgaaaggtctgtggggatttttgcgttatgaattcaaacaaccggaggatttcctttatgataaattttaagaaatacggaaagcgctgtctgtctctttttctggcggcatctatgatattaatgccggcagtacagatatttgctgaggaagaaacggcggcagccacaacagattcaactcagacagcggaagaagacagggagacacagcgtcagaactgttatgcgatcgtaccggattcaaacagtgtggagaactggccacagggaccggcaacttatgcggactctgcaatcgttatggatatgaacagtggggcagttttatatagcaagcagattgaaaagaagcattatccggcgagtattacaaaacttctgacaacattggttgcgctggacaatgcagagcttacagatacggtagaattttcccaggacagcatttcctttctggaatatggcgatgcccatatcggcatgacaccgggggagcagatcagtatggaagatgcgctctatgccgttcttctggcatcagcaaatgaggtttcttatgcagtagctgagagtgttggcaagaagatgggtgggggttatgacacatttattcaggcgatgaatgatgagtcagaaaaacttggatgtacaggttcacactggacgaatgcgaacggacttcatgatgaacaacattatacaacggcgcatgatatggcaagaattggtgcagcagtttatcagaaggaagcgtttcggacaatttcccaatcgttaagccatacgattccggcaacgaatctggtgaatgaagaacgtacttttcagcagaagcacaagatgctctggccacagaatgataattattatgaatactgcaagggcggtaagaccggctacacagatcaggcaagaacaacgcttgtgacaatggcagataacggagatatgcagcttgttgcggtggtactttatgattttggaaatgatgcttatatagatactcgtgccatgtttgattatgcttacagtaatttttcaaaaatatctttgaaggatcagaagcttccggaaggtgtgaagtcttatgaagacgaagatgcttatatcgtacttccgaagagtgcacaattttctgatgtgaaagcagaagtgaaggaagacagcaacaaggatggatccggaacagtaacatttacttataaagggcaggaagtaggcagtgtgaaagctgcgatagaaaaaacagaggaaagcagtgcagctgttttggaaaaaaagaaagataagacaacttcaactgtcgtaactgggatttcaaagtttatgaaaattgtgatcggagttgtaattgcagttgtgattttattgatcatcattgttgtacttgcgaattaccggaagcagataagacgtcgcagaagaaaaaaaggaaaaagaagaaatgcaaagagtggtaatgtgaaaagaaagaagaaacgccgcagataagaaaacagaaatttgcgaaagaacgctgaaaacaacgttttttcgcactttttttatcataataaaccttgactagagccaagaatctctttataataagccgtgtgtagaagttcacaggtaaagcgatgacggagacagtaggatttatctgaacgttacagcgagccggagatggtgggagtccggtgcaagtaagagatttttgaagatcactccagagcagcagttcctgaaacagatgcagaaaagaggtttctgcagaaagagagagtaaggactgacgcgtgtccggcgttaaaggataccatatgcaggtcagaaatcagacctaagtatgatgtaacaggtggtttaacgagagaagttcaggctttcgtcctattacaggacggaagcctttctttttttaagaatcataaaataaactcaggaaaggataagaacatgtataagaaagtttcaactgacatgaattttgtcagccgtgaaaaagaagttgaaaagttctgggatgataatgaaatcttccagaaaagtatggatgaaaaagaaggatgtccggattatattttctatgacggacctccgacagcaaatggtaaaccgcatatcggacacgttttaactcgtgttattaaggatatgatcccgagataccgtacaatgaaaggatatatggttccaagaaaggccggatgggatacacatggtcttccggtagagcttgaagttgagaagcttcttggtcttgatggaaaagatcagattgagaaatatggtcttgaaccatttatcaagaaatgtaaagagagtgtatggaaatacaaaggaatgtgggagaatttctccggtacagttggattctgggctgacatggagcacccatatgtaacttatgataacaactttattgagtctgaatggtgggctctgaagcagatctgggataagggactcctttacaaaggatttaagatcgttccttactgcccgcgttgtggaacaccgctttccgcacaggaagttgcacagggatacaaggatgttaaggagcgttcagcaatcgttcgttttaaagtaaaagatgaagatgcatatattcttgcatggacaacaacaccttggacacttccatccaaccttgcactttgtgtaaatccgaaagaagattacgcaaaggttaaggcagcagacggacatgtatattatatggcttgcgcactgcttgatacagttcttggaagacttgcagaagaaggcaaagatgcttatgaaattcttgagacttacaagggaactgatctggaaggaaaagagtatgagccgttgtatcagtgtgcagcagacgaggctgcaaaacagcacaagaaagcattctatgttgtatgtgatgaatatgtaactctgacagatggtacaggagtcgttcatatcgcaccagcatttggtgaagatgatgcgaatgtaggaagaaaatatgatcttccattcgtacagcttgtagatgagaagggtgatatggcagaatctacaccgttcgccggtctgtttgtgaagaaggctgatccggaagtattaaaagatctggatgcaagaggacttctctatgatgcaccgaagttcgagcatagctatcctcactgctggagatgtgatactccgctgatctactacgctcgtgagtcctggttcatcaagatgacagcagttcgcgaagatctgatcagaaataataacacaattaactggattccggaaagtatcggtaaaggacgtttcggtgactggatcgagaacgttcaggactggggaatcagccgtaaccgttactggggaacaccactgaatatctggcagtgtgagtgtggacatatgcactctatcggaagcattgaagaactgaaatcaatgtctgataactgcccggatgatattgagcttcaccgcccatacatcgatgctgtaacaatcaagtgtccggagtgtggtaaagagatgcacagagtaccggaagttatcgactgctggttcgacagtggatccatgccatttgcacagcatcattatccatttgaaaatcaggatctgtttgagagacagttcccggcagactttatttctgaggctgtagaccagacaagaggatggttctactcactgcttgctatttcaacactgctgttcaacaaggctccatataagaatgttatcgttcttggacatgttcaggatgaaaatggacagaagatgagtaagtctaaaggaaatgccgttgatccgtttgatgcactggagaaatacggtgcagatgcgatccgttggtacttctacatcaacagtgctccgtggctgccgaaccgtttccacggaaaagccgttcaggaaggacagcgtaagttcatgggaacactttggaatacttatgcattcttcgtgctttatgcgaacattgataattttgatgcaacaaaatatactctggaatatgataaacttccggttatggataagtggatcctctccaagatgaacacaatggtaaaagatgtagattataatcttggcaattacagaatcccagaggcagcacgtgtgcttcaggatttcgtagatgatctgagtaactggtatgtaagaagaagccgtgagcgtttctgggcaaagggaatggagcaggataagatcaatgcttacatgactctgtacacagctcttgttacagtatctaaggcagcagctccgatgatcccgttcatgacagaagagatttatcagaacctggttcgcagcattgataaggatgctccggaaagtattcacctttgtgacttcccagaagttcatgaagagcagattgacaaagaacttgaaaataacatggaacatgttcttgaccttgttgttatgggacgtgcatgccgtaatgcatccaacatcaagaaccgtcagccgatcggaaagatgtttgtgaaagcagactttgatcttccggaattctatcaggagatcgttgcagacgagctgaatgttaaaaatgttaaatttacagatgatgtaagagactttacttcttatagttttaaaccacaattaaagacagtcggaccgaaatatggtaagatgttaggtggtatcaaagcggcgcttaacgacatcgatggaaatgcagcaatggatgagctcaacgctacaggtgcactcaaactggatgtaaacggacaggaaattgaacttttcaaggaagatcttctgatcgatacagcacagattgaaggatatgaatctgtaaatgacaacggaatcacagttgttctcgatacaaacctgtcaccagagctgctggaagagggatttgtacgtgagatcatcagcaagatccagacaatgagaaaagaagctgatttcgaagttatggacagaatcaaagttacatacgagggtagtgaaaaggcagaagctgttttcgaaaagaacaatacactgatcgcaggtgaggtacttgcggatgaagttgtaaaagcacagccggctggttacgtgaaagaatggaagatcaacggcgaagtagttacaatgggtgttgagaaaaaaggagagtaataaacatgttcagtaaaagattcgagaaaaaggcttttaaagcggcagtaaaggataacgttaagacactttatagaaaaacaatcgatgaagctacaccgcagcagttattccaggcagtatcctatgcagtcaaagatgttattatcgatgattggattgagacacagaaaagatatgatgagacagacgccaagacagtatactatatgtcaatggagttccttatgggacgtgcacttggcaacaacctcatcaatatgacagcatataaagatgtaaaagaagcactggaagagatgaatattgatctgaacgtgattgaagaccaggagccggatgcggctcttggaaatggtggtcttggacgtcttgcagcatgtttccttgattctcttgcaacattgaactatcctgcatatggatgtggaatccgttaccgttatggaatgttcaaacagaaaatcaaagatggatatcaggtggaggttccggacaactggctgaaagaaggaaatccatttgaaattcgccgtgaagaatacgcaaaagaagtacgctttggcggaaatatccgtttcgagaaagatcctgtaacaggaaaagataaatttatccaggaaaattatgagtctgttatggctgttccgtatgatatgccgatcgttggatatggtaaccatgtagtaaatacactgcgtgtatgggatgcaaaaccgatcacagatttcaagctggacgagtttgacagaggaaattatcacaaagcagtagagcaggagaaccttgcaaaactgatcgttgatgtcctttatccgaatgacaatcattattcaggaaaagagcttcgtctgaaacagcagtatttcttcatttctgcaagtcttcaggctctgatcgagaagtataagaagaaacatggagatatcagaaaactgcacgagaaagttgttatccagatgaacgatacacatccgacagttgcagttccggagctgatgcgtcttctgatcgacgtagaaggattaagctgggaggatgcatgggaagttacaagcaagacttgtgcttacacaaaccatacaatcatggcagaggcacttgagaaatggccaatcgacttgttctcaaaattacttccacgtatttaccagattgtacaggagattgatcgtcgtttcctgatcaaggttcgtgagatgtatccgggaaatgaagagaaagtccgcaaaatggcaatccttatgaacggacaggttcgtatggcgaacatggcaattgttgcaggattctctgtaaacggtgttgcacagcttcatacagaaattcttgagaaacaggaactgaaagatttctatcagatgatgcctgagaagtttaataacaagacaaacggaattacacagagacgtttccttgcacatggaaatccgctccttgctgattggatcacagataagatcggtgacggatggatcacagatctgtctcagatcgcaaaactgaaaccgcttgtagaagatgaagatgcaagacgtgaatttatggaaattaaatatcagaataaagttcgccttgcgaaatacatcaaagaacataacggaatcgatgtagatcctcgttctatctttgatattcaggtaaaacgtctgcacgagtacaaacgccagctgttaaatatcctgcatatcatgtatctgtacaatcagatcaaagagcatccggagatgtccttctacccaagaacatttatcttcggagcaaaggcggcagcaggataccttcgtgcgaaagagacaatcaaactgatcaactccgtagcagatgttgtaaataacgacagaagcatcaacggaaagctgaaagttgtatttatcgaagactacagagtatccaatgcagagattcttttcgcagcagcagatgtcagcgaacagatctcaacagcttccaaagaggcatccggtacaggtaacatgaagttcatgctgaatggtgcaccgacacttggaacaatggacggagcaaacgtagagatcgttcatgaagttggagaggaaaatgcattcatctttggtctgagctcacaggaagtaatcaattacgagaacaatggcggatacaacccgacagatatctatttcaatgattgggaagttaaacgtgtggtagatcagctgatggatggaacctactcaaacggtgatcacaacatgtatatcaatctgtataactcactgctcaatacacagtgtacagacaaagcagatacttacttcattctgaaagacttccgttcttatgcagatgcacagaagagagtagaagaagcttacagagatcagcagagatggtctaagatggcaatgatgaacacagcatgcagcggtaagttcacatctgacagaacaatcgaggagtatgtgcgtgatatctggcatctggagaaggttgaagttccatcaggacaggaccttttcgaataagcaattacacggagaatgaaccagataagttctaaaataggacagccttccatacaatagagtatggagggctgtttttatgcgtgatacaattagaaataaaataaagttattttttgcatttcttatcatactgtttttacttccttacatcatttctgtttttataaacggaaaaaatgcggtgcagggagctgacagcgataatgcatctgtgtatctcgcagaaatgctcgcaggagaaacagatggtggatgtgaaatagaagcattgaaggcacaggcggttgttctacgtacagagttgtacagaacagagaaagaaaagcagactcttttggataaatgtctgacgcagactcagatgaagaaaaagtgggggacaaaatacgaagagaatttgaaaaaatgtcaacaggcagtacaggaaacaaaaggaattgtactgtggtatcatgagacctttgcatggacaccgtttcatcaatccagtaatggaaagaccagagatgtgcaggaggtacttgggaatgcagattatccgtacatcacagcaaaagaatgtccgcttgacaaggcggcagaagatgaaattcaggtacatttgatagaatataaagagatacaaaagagatgtagagaattccttgtggcagaggaacagaaaaaagcagaaaatgggtatggatacgaagattttgaaattcaggaatgggattcttccggttatgtcagaaaaatgaggattggagagacgatatgtacaggagatcagttccgtgatgcactgaaacttccttcgagttcattttctttttatgaaggtccgcatggattaaaaattgcaactgttggaaaagggcacggattcggaatgagtcagtggactgcacaggaaatggcaaaggatgggaaaaattatgaagagatcctgcaatttttttacgaaggaacagaactacaccacatagatgaataagatcgatcatttcaggcaatgctatggccagaggtgatgattatgaataaaaatgaaagaccggcctttttgaaaggaaagggagctgcagttggcgcagtactttgttttgttgcggtaattacaatggttgggagctacacatacaatcattacaaaaaagatatggagcagcagatcaaagatgcgcaaacaacagcagaacagcttacagaagatgatagtacattggcgaatacagatgatattcttcctacagacacagattcagaagaggataatgaagaaaaccaggaatcccaaaaggatgttcagcaagagaatgaaaacagtgtggagaatggaaatacatccacagaggaaattcaaagcacagcatcttcaaatacacagaatgtgtggtttactcaggaaagcacacttgcctggccggcaagcggagcaacgcttttaagttttagtatggatcatacagtatattttccgacattggagcagtataaatataatcctgcactgattattggtggaacgcagggagaagtgattcacgcggcggcagcaggagtggtagagagtattgaacagactgcccagacaggaactactgtgacacttgatatgggaaatgggtatactgcggtttatggccagctggatgaagtggcggcagcagtcggagattatattgcagccggagaggaagtgggaacactgaattcaccgacgaaatattatagtgtcgaaggacccaatttatattttgaaattatgaaagacggggcaccagttgaccccatgaattttatggagtaaagttgtatttgtttggataaaatgatggattcaaaagtttgattacgggtgcaggatcaatactatattgtattggatacaggaaaaagtttaagaaaagttttcctgataatatagtattgatcctggataagggattcatgatataataaataacatgcatcgaaagagtaatgcgggagatagcagaggtgatgagtttttgaattatacatatatgctaaaatgtagtgacggaacgttatacacgggctggacaaatgatctggaaaaacgtgtggaggcgcacaattccgggaaaggcgcgaaatatacgaaggcacggcggcctgttgaattggcttattatgaggaatttgagacaaaagaacaggcaatgaaacgggaatatgcaattaagcagttagggagaaaagagaaacagaaactcattgccggcaaaaaagttaaattatcagatgaaagaaaagagaaagaagattaaaaaactgcctatcaggaaggaaatgttccattcccgatgggcagttttatcatagcagaagagatcgcttctgctgataaggtttgtttaaattagccgaagtatctcttaagcagtccttcgaaagcttttccgtgtctagcttcgtcgcgagccatctcgtgtactgtgtcgtggattgcatccaggttagcagctttagctctctttgcaagatcgaatttaccttctgtagcaccgtgctcagcatcaactctcatctcaaggtttttctttgtgctgtctgttacaacttcaccaagaagttcagcgaattttgcagcatgctctgcttcttcgtaagcagctttttcccagtaaagtccgatttccggatatccttctctgtgagcaactcttgccattgcaaggtacattcctacttcagagcattctcctgcgaagtttgcacgaagatctgcaagaatatcttcgctgacaccctgtgcaacacctacaacgtgctcagcagcccatactttgtctccttcctgctctttaaacttggaagctggtgcgtgacagactggacattcagctggtgcagcatctccttcgtgaacataaccacatactgtacatacaaattttttcataatgataatctcctttttcttattaattttttttaacttaagacttcctaatgcagtcactgcattccccataaaacaaagtggaacttgaagtgatgattccatcgaaattctccccggccagccggttcacttcttcaatactcttcatatccagttccagatccagtaaccgtccacagcttgtacagagaaaatgattgtgcggaataacattcccgtcaaatcgatctccgccgtcaggtgtagggatcttgatcgcttcgccgatatctgtcagcagattcaaattccggtaaacagtaccaagactgatattaggaaaatcctctttgacatgcaggtaaacagtgtcggcagtgggatgctcttttgttgaagcgagataatgcttgatagcttctcgttgtcggctatatttaattgcagccatagattcacctctttctaaaattgaatcaataacgataacgattactgtaattagaatataacttatattttaaaaattgtcaatagaaaaaaataagttttttttatttctcctgacaaaatattacaaaataattaacaaaaaggacgttaagattaataaaaaaggggaataattacaaatggtggagggtgataattatgaaaaaactattaaaacggttgacacatctattgttgattgataaaattacggcgtaacaaaaattaacaattatgtaacaattaaaacttcccacaaaagataaggctggaaataaaggaggttttatatgagtaacatgcggatgaagcataagcttatcatgtcaatgatggcagggatgatcataattccggggagtgtagtcagaacacaggcggcagaaactgatgacagtgagaagagtctggttccggttacaggaattgaaaacattttggaagcatcatatcagacagaaataaagaacaacatcaatctgtatctggtgccgacagaagagggagagtatttgaatatagcgttttctaatacgggggattatacctatattagaagcgaagcagatgaaaacagtgaatgggttggaaaattatattctgattcagcagcagttgtgttggaatatctggatggatggacaaagatccggtcgggaaatgcagaggggtatgttccgacggaaacattgttcacaggggaagaagcccgttcgaggtcagatgagtatacaaatgagaatgtaacagtcacagcagattgtctgaatgtcagagagggacatgggacggatactaccgtattaacccagattaatcagggagaagaatatcttgtgacagaagatcctgtagagggctggtatccgatacaggtcggtgaagttaatggctgggtgtgcggtgattatgttacagaggaaagttcttattcttacggggagacaaaagaggaagaacaaaaacgaatggaagcagaagaagctgcggttgcgaaggcggaagcagaagcccaggctgcagaagcagcggctcagtcagttgcgtcagggcaggaagttattgattatgcctgtcagtttattgggaatccatatgtgtggggcggtacaagtttaacagatggagcagattgttcgggatttgtccagtctgtgtatgcacattttggtataagtcttccacgaacttcttatgaacagcgaagtgcgggatatgaagtgagttatgaagacgcacagccgggggatcttatcttatatgaaggacatgttggtctatatataggaaatgatcagattgtaaatgcaatgaatgaagatcagggaattggtatcagcagtgcaacgtatacaaatatcgtggctgtcagacggatttattaaagaataatagaaagaaaacaatgcattgtccagaatatgtatgggaaatgaaagatttgactgtaaattctaaaatcggtatttcccaagaaaaatataaggatagtcaaaatgcacaaaatatgacaagaatattcaaaatagcaaaaaaatgaaaaaaagtagtttttaacttatcaacattgaaaaatcgaaaaaatgaggaaaaataaaagatttcctgaaagttatccacattatcaacaaagaaagatgtgaatagtgtggataacttttggaaataaaaagaacattcgttttggttattgttatgaaaatgacgatttgtcgaaaaaaaaaagaaaactgattgacttttgagtagtgtgataaacggaaaaagttgtgtgaaaatttcagaaaatttcatggaatgataatgaaaataaggttgctaaatcatagatcagggattataataaagattactgttcaagggtgacagaaattaattgaaaatagaaatatgtaaggaggaaacagtgatggcaatttctaaaagcacaacaattggcgaacttctggtaacatttccagagtcagctccgattttgatggagattggtatgcattgtcttggatgcccgtcatctcagatggagtctcttgaggaagcagctatggttcatggaatcgatgcagatctgcttgtagagaagatcaatgcagcaatggcagccgctggtaaataattaagagaaaagatatacaagaagctgttgtgctctcaaaaagagagtatggcagcttttttatatattaggaaagtgctttcctaatatataaaaaacgctccgctaaggatgcgcactgcggcgtacaatgtagatgtcgcaagcggtctacgtttccacttcggtccttgctaaacaagcgccactggcgcttagcaacgccgcaggcgcaagaatgtgcaaggcacattctttattcgtatcgttaaaagtttttgtggataacaagtgaaaaagacggcctgaagtgtgggaaaagttattcccataattccagaccgtcttttttattcgttgtttaaattgtggataacttctgaattgcgtctgcggaaacaatgattttgcaatgctcctccagaaatgcaagaacagaagaatctcccttctcaggggaactgtactccgaaagcatattacatactttattaaattcctgatctgcgccatcagcaggtgccagcgcaaggataaaggtattattattctcctcgtccttatataatgtatttgcacctgtatagaacggagcaagcaggcgggaagcctcaattacggaatctaacgtgtcgaaagagaacaggcggaccggaaatgtcggtactgtttctttaggttccggatctttcgcttcggaagccacttccttcactttgttaagcagatcaaagaattcatctgcgccctgaagcttttcaagaacattgctgttcagtgtatcagaatctccggcaggtgtaaacttggaaaaacgtgtatcaagttcttccggatcctccacctttgttatgattaaggtgatagagtctgaagaagaaggaattgcttctatcatcagaggaaggtcatctgcctcgaatccaaagtcgaaagaggcctgctgcatcatatctcgaaatagtgattttgctttctcggtaccataagccagttcgctgatcttgagattgcgggctgcaagatcggcatgtgtcaaagtacaacgaatctgattgtcattgattttttcaattttcatatgatcacatccttatgtcttatgatattaagataatctgtggattaagaactgttcattatgttcataactagatatatcttttcatcgtttagtataaacaaaaaaagaaaagatgtaaaggaaaacgaaaattgtttataactattttaggttatcaacaaatcccacccacttatcaacaataaacacattgaaattccaaaaggctgctcatataatggcacttacagaagacacaccatttgataaaacagaatgttaagaaaggaggcactgaaagcatttctgattttcaaaaaaattcaattccctgaaatcaagggaaaattcacaataattatgagaaggagaccctccgaagatcagggttgtcttcttgtccgtcacttgttctacagtatgtcacagataccttttatggtcgaagatggcggacaacgttttatcaggatcccaggagagaaggagtacatacgatatgagaacggaagatggatataaggaattatatgcggaactaagaggttatgaagaaaaaggagtggacatagttatggatggatatccgatgagtccattgcagattgtgacagcatatatggccagagaagaaggtacttatatgagagattatgtgattgatccggaaggaaggatagaatcattggtttttacagatgtgaatcataacagacaggcagagattaccccttgaactgccggacagaagtatatttgtaagctgttataattgatagaagatggacagacatttaaggtgtaacaactttttgatatgtacaactgttgtagatgcaatttgttaatgacgcaagatgaaaatatgatataatgaattccagaatcattattttatccagagatgtggagatattagaaatacacacagcagagcgtaaggaactgtttgtgtaagaaagcgccagagatataaaaattgcaatcaggagggttggcatggacaaaagaaaaggcagtacccatgcgcgaagcaggggaagagtagaaggacaatctggacatccggggagttcccggagaaagggaagaccaatgacaacaggtagaggcagaaatggaaggtcaggaacacgacgtgcgaagaaagtgaatagagcgcggaaaagacgtaacaaaattcttttcgtaatgatcatcatattattgatcatgattttggcagcaggcgcagttttctttaagagatacggttcatcaaatgaggaagccgataaagaacaatattatggaatagaaaacagtgatgatctggcattgatcattaataatgaagtagtgaaaaaagaagatagttccgcggaatcttcttccgattcttctatagatagtgttataccgggtaaggtttttgatggacaatattatgtagcatatcaggttcttcgtgataagataaacagcagattttactgggatgcgaacgaacgggtgcttttatataccttgccggatggaaatatttctgtaagtgagaacagcagtgaatatacagcagtgaacgaaacaaaaagtgaagattatgtaattcttaagacggatggagatatcgcatatatcgcacttccgttcatacaagagtatacgaatatggaatattctgtggaacaggaaccaaacagagcaattatcacatcaaagtggggcgagatcgagacagcagaagtgaagaaagacacacaggttcgttatcttggtggcgttaagagtccgatactgacagaagttaaaaaatcggacaaggtgacagtgcttgaagacgaagatgactggatgaaagttgccacagtggacggttatgtaggatatattaagaccaaatttttaaagaaccagaaaaaagaaaaaacatccagagattttacggaaccggtttattcagacatgacagaagatcattcgatcaatatggcatggcataatgtgacgaatgcggcagcgaataatgcggttcagcaggtacttgcatcaaccagtggacttacgacgatcgcaccaacctggtttagtcttgcggatacggaaggtaatatcagttcaattgcagatgcggactatgtgaattatgcacatacggcaggactggaagtgtgggctgtattccgggattttcatggtggaacgaattcctatgatgagacctatgagacattgcgttatacatcaaaaagagcaaaactggaagatcaggttgtagctgcggcagtggcagcaggagtggatggaattaacttagactttgaattgatttcttccaagtgtggtgtgcattacgtgcagcttgtgagagagctgtctgtgaagtgccaccagaataatcttgtattttcagttgataattatgtgccacagtcatacaattcacattatgatcttaaagagcaggggattgtggcagattacgtggtgattatggcttatgatgaacatacagaaggatcctatgaagcgggatcagtggcatcgatcagctatttgcaggatggaatagaaaaaacattgaaaaaggtatcagctgataaagtaattgccggaattccattttttaccagattatggtttgagacagcaaagagcccggagcaactttcggaagaagctggtacagaagcagcatcttatccgaataaagtatcaagtaaggcactgggaatggaagaagcagcgcagagtgttgtgaatgcgggagcaacagcacagtgggatgaaaagacacagcaaaactatgcaaaatggtctgcggatggcggaacctaccgtatctggcttgaagatgctcaatcattggaagcaaagctgaaggcgatacaggaaaataaactggcaggtgtggcagaatggagtctgggaaaagaagaaagcagtgtatggaagctcatttctcagtatgtaaattaaataaaagataagttaaaaaacggcttctcattgcatatagatagaatatgtgaagggaggtcgtttttttgcaaagaaaaatcaggttgatgatagggattctgattatgacagggcttatcgcaggttgttggaaagtttcgaaaaacttacagaaagaattaaaagaagaaatggagacaatcggagaagcagaaaagtcagacaggatagttgttttagatgcaggacatggtggtactgattcggggaaggtcggaatcaatggagtgaaagaaaaagatatcaatttaacgattacgaattctgtaaagaaaattttggaaaaagaaaatatacaggtaatcatgaccagagaaacagatgaacagcttgcacaaagtaaagtagaagatttgaaatacagagtaaagattatgaatgaagtttctcctgtattagcagtcagtatacatcagaacagttatcatgaagaaaatgttttcggtgcgcaggtcttctactatcagacatcgacggaaggagaaaaagctgcggggataatacaggatgctttacaaaaggtaaatccggataataccaaaaagataaaagcaaataatacatattatatattaaaaaagacggaagtacctacagtgatcgtagaatgtggttttttgagtaactataaagaagcacagaagctggttacggaagattatcagaaatcagtagcagaagcagtggcagaaggaattttgtcttatataaaagaaaatgaatagtagaagagaaacagtttttttttagaacaaataatgatataataaaatttatggaaacgattattagaaaaatagataaaaaccaaataaaccaggatgtaatagaagaagcgggaaatgtattaaaacaaggaggtcttgttgcatttcctacggagacggtttacggacttggggcggacgcattaaaagaggaggcggcaaagaaaacatatgcagcaaaaggacgtccatcagataatccgttgattgttcatattgcagactatgaggatttgaaaaaagtggcggtgaatattccaccggagacagacgcactggcagcacatttttggccaggtccgctgacgatgatatttgaaaaaagtgagagtgtaccttacgggacaaccggaggattagatacggttgcggttcgtatgccaagtgatccaattgcagcggcattgatccgggcggcaggtggatttgtttcagcaccgagtgcgaatacatccgggcgtccgagtccgacgacagcagagcatgtgcgggtggatctggaaggtaagattgatatgatcctggatggaggtgcggtagatatcggattggaatccacaattcttgacatgacggtagagccgccgatgattttacgtccgggtgcaattacagcggatatgtttgaggaggtaatcggaccggttggtgttgatgagacattggttaacagtgaaagcaagcaggcgccgaaagctccgggaatgaagtaccgacattatgcaccgaaggcgaaaatgatgattgtggaaggaaatataagagaagagattcttgcaattcgtcagcttgcttatgccgcgcatcgggaaggaaaggaagtcggaatcattgcaacgggggaaacagttcagttctataattatgggattgtgaagaatataggaacccgtgagaatgagaatactattgcaagaaacctttatcgagtgcttcgtgaattcgatgaagaagacgttgatctgatttatagtgaatcttttgctatgaacggaataggaaaggcgattatgaatcgtcttgaaaaggcggcaggacatatgcacctgcaggcaacagagatcacaaagaagcagaagtatcgaagagtgatttttgtcagcgaggcggattcggcagtaggaccaatggcggcagaattactatgtcaccaggatcttgagcaagagtatattattgaatccggcggactggttgtgcttttccctgaaccggtaaaccagaaggcagaggcaattatgaagagtgctcagatgacgttggaaaatcatgtgtcaaagcagtttgatggcagcaatctacaaggagatacacttgtattgacattgaatgagacaattaagaacaaagttctttcggattatgaaaatgtaaaaaatgtatatacaataaatgaatttgttggagtatcagaagaacttccgaatccttatggaaaacccctgacagcttatggagaatgttttgagatactgacaggacttatagataaacttgcagacaaactgaattcatatgcaaaaggagaagaataatgtcagataaaagaacagattatttatcatgggatgaatattttatgggcgtggcaatgctttccggaatgcgatcaaaagacccgaatacacaggttgggtgttgtattgtaagtcaggataataagattctttccatgggatataatggtcttccgatgggatgttctgatgatgaattcccatgggcgcgcgaaggcgaagatccgttagagacaaaatatgtatatacaacgcatagtgaattgaatgcaattctgaattataatggcggaagtcttgcgggagcaaaactttacgtatctctttttccgtgcaatgaatgcgcaaaagcaattattcaggcaggaattaaagaagttatttatgattgtgacaaatacgcggatacagcgggagtgaaagcatcaaaacgaatgatggatgcagcaggagtgagatatcaccagtaccatcgaacaggcagaaaaattgaatttgagatataaaaatacaggtacgcttgcattgcgcttgcgtacctgtttcaaagaaaagggagatagaagaaatgattcggacaatacgtgtagaagaaataacaaaaaacatcaaagaaatgtgcattgaagcaaatcattttctgtcaccagatatggcagaggcaatgaaatgtgccgaaaagaatgaggaagcaccacttggaaaacagatattggaacagttgcaagagaatttgaagattgcaggagaggatatgattccgatttgccaggatacaggaatggcggtagtgtttcttgagattggccaggatgttcatcttgaaggaggagcattggaagatgcggtaaatgaaggcgtacgtcaaggttatgtagaaggttatcttcgtaaatcagtcgttggagatccgttgatccgtgagaatacaaaggataacactccggcagttttgcatacaagaattgtagatggagaccaggtaaagataaaagtagcaccgaaaggtttcggaagcgagaatatgagtcgtgtatttatgctgaaaccggcagaaggaattgaaggtgtaaaagatgcggttcttactgcggtaaaagatgccggaccgaatgcgtgcccgccaatggtggttggtgttggaattggtggtacatttgaaaaatgcgctttgatggccaaagaagctctgacacgtgaagtcggatcacattcagaaattgaatacgtaaaagagttggaagaagaactccttacaaaaataaatagccttggtatcggacctggtggacttggagggacaacaacagcacttgcggtgaatattaatacttatccaacacatatcgcgggacttccggtggcggttaatatttgctgtcatgtaaatcgtcatgtgattcgtacaatttaattcaacaggctaagtgaaagaggaaagtgaaatggacaagcatataacagtaccaatgaagaaagagaccgtagcaacactgaaggcaggagattatgtttatcttacaggaacggtctatacagcaagagatgcagcgcataaaagaatgtatgagattttacaggaaggcggggaacttccaattgatattcaaggtcaggtgatttattacatgggaccatcaccggcaagagaaggacgcccaattggctcggcaggaccgacgacagcaagcagaatggataaatacgcacctcagctcctggatcttgggcttggtgctatgataggaaaaggaaaaagaaatcaagcggtaattgatgcaattgtacgcaatggttcagtatattttgcggctgttggtggagcaggggcgcttctttcaaaatgtatcacatcttcagaagtggtagcgtatgacgatcttggaacagaagcgatcagaaaactgacagttgaaaattttccggttattgtagtaatagataaagatgggaataatctttatgaaacagcaattaaggattattgcagaatggaggagaatgcatgagaagaattctactgatggtattgcggaatctgttgatcgtgccggggggatggattaaactctgctatcgggcttcacatgtggataaatatacagaagaagataattatgaatttttgcgttggattgtttttcgtgcaaataaaggcggaaatgtaacaatcgatgtacatggacaggagaatattccaaagcaggatggatttatgttttttccaaatcatcaaggtttgtatgatgtattggcaattgttgaagcgtgtacgcaccctttttctgttgtagctaaaaaagaagtggaaaacgttccgtttttaaaacaggtatttaaaatcatgaaagcatttatgattgatcgtgaggatgtccgtcaggcaatgaaaaccattacaagtgtaacaaaagaagtcgtatcggggagaaattatcttattttcccagaaggaacgcgttcaaaaaatgggaataatgtcggttcttttaaagggggaagctttaaagcagcaaccaaagcaaagtgcccgattattccggtggcacttgttgattcttttaaaccgtttgatacaaacagtacccgaccggtgacggtgcaggtgcattttctgaaaccgatgctttatgaagattataaagatatgaagaccgtggaaattgctgctgcagtagaacagcagatccaggaaacaatcaataagaacctgacgaaagaaaaggtagaagagaaatgctaaaggaatgcttggatcaagttagaaaaaaagccccagtggtgcataacataacaaattatgtaacagtgaatgatgttgcgaatgtgattcttgcatgtggtggcagtccaattatgtcagatgagccggaagatgtagcggacattacatctatatgtggagggctgaacattaatttgggaacattacataaaacgagtattgagggaatgcttaaagccgggcatcgctctaatgaactgggacatccggtattattggatccggtgggagcaggagcaagcaggttcaggacggagacggcattaaaattaataaaagagataaagttttctgtgattcgaggtaatgtttcagaaattaagacgctggcttatggaagcggaagtacaaaaggcgtagatgctgatcttacagaagccgttaatgaaagaaatttgcaacagagcatatcatttattaaaggttttgcgaaaaagaaagaagcaattgttataattacaggagcaatagatcttgtgacagatggcgagaaatgttatgtaattagaaatggacgttcagaaatgggaagaataactggcacgggatgtcagttatccggtattacgaccgcttttctggcagcaaatccgaaaagaaaactggaagctgctgtggcagcagtttgtatgatgggcgttgccggtgaaatagcatggatgagaatgcaggaaggcgatggtaacgctacatatagaaatagaattattgatgccatctataatatgacaggagaaaaactggagaaaggggctaagtatgagctttactaaggaacaattaagggaacagatgttgctgtatgcggttacggacagacattggctgaatgggcagacgctttatgaacaggttgaggaagcgctgaaaggtggcgctacctttattcagttacgtgaaaaagatttgacagaagaagagtttttagaagaggcaaaaaagatacaacagttatgtaaaaaatatagagttccattcataattaatgataatgtgaagcttgcgaaggaaattgatgcggatggagtgcatgttgggcaaagtgatatggaagctcttgatgtaagagcgcagctgggagaagataaaatcataggcgtctctgcacggacagtagagcaggccttattagctgaaaagcatggggcagattatctgggagttggagcggtgtttcaaacaggaacaaaaacagacgcacgggaagtagaacacagtgtgttgaaggaaatctgtactaaagttgatattccggttgttgctataggaggaattacacaagataatgtaaaagagctttcgggtagtggaattaatggtgttgcagtgatcagtgcaatctttgcccaaaaggatattgagacagcaactgcaaagctgaaaagctgcgtagaacagatggtttaaaaatttgttaaaaaaatgaaaaaaagtgattgacaagatgacggtgtattgctataataaatttcgcactgttggtgcacacaattgaacaaagctatagattctatagtagaattcagtgtacggagaaatactcaagaggctgaagaggcgcccctgctaagggtgtaggtcgggcgaccggcgcgagggttcaaatccctctttctccgtttaacttaaatcaaaagagcgggacgacagaagtctggcgacttctcctgattttgaagaaagttaaaaatcatgtaaaaagaaaataaaaaaacttcaaaaaagttcttgactttctaaaaaatacatgataatataaatgagctgattcgctgaaacaaagcgaagaggtaagaaaaataaaaaacttcaaaaaagttcttgacaaagcgaagtgcttatgataaaataaatgagctgtcgcaaatgaacaaagcgaagtaagaaccttgataactgaacaatagacaacaacaacccttgaaaatttctttaagagaagatttttaagaacggtttttaacaaaccaaaacaacagtaaaaagggaagaattagctagttggttgattctgaactggatacaaacacttttaacgagagtttgatcctggctcaggatgaacgctggcggcgtgcttaacacatgcaagtcgaacgaagcaccttattctgatttcttcggaatgaaaaatttggtgactgagtggcggacgggtgagtaacgcgtgggtaacctgcctcatacagggggataacagttagaaatgactgctaataccgcataagaccacggcaccgcatggtgcaggggtaaaaactccggtggtatgagatggacccgcgtctgattaggtagttggtggggtaacggcctaccaagccgacgatcagtagccgacctgagagggtgaccggccacattgggactgagacacggcccaaactcctacgggaggcagcagtggggaatattgcacaatgggggaaaccctgatgcagcgacgccgcgtgagcgatgaagtatttcggtatgtaaagctctatcagcagggaagaaaatgacggtacctgactaagaagcaccggctaaatacgtgccagcagccgcggtaatacgtatggtgcaagcgttatccggatttactgggtgtaaagggagcgtagacggagtggcaagtctgatgtgaaaacccggggctcaaccccgggactgcattggaaactgtcaatctagagtaccggagaggtaagcggaattcctagtgtagcggtgaaatgcgtagatattaggaggaacaccagtggcgaaggcggcttactggacggtaactgacgttgaggctcgaaagcgtggggagcaaacaggattagataccctggtagtccacgccgtaaacgatgactactaggtgttgggcagcaaagctgttcggtgccgcagcaaacgcaataagtagtccacctggggagtacgttcgcaagaatgaaactcaaaggaattgacggggacccgcacaagcggtggagcatgtggtttaattcgaagcaacgcgaagaaccttacctgctcttgacatctccctgaccggcaagtaatgttgcctttccttcgggacagggatgacaggtggtgcatggttgtcgtcagctcgtgtcgtgagatgttgggttaagtcccgcaacgagcgcaacccctatctttagtagccagcggttcggccgggcactctagagagactgccagggataacctggaggaaggtggggatgacgtcaaatcatcatgccccttatgagcagggctacacacgtgctacaatggcgtaaacaaagggaggcagaaccgcgaggtcgagcaaatcccaaaaataacgtctcagttcggattgtagtctgcaactcgactacatgaagctggaatcgctagtaatcgcgaatcagaatgtcgcggtgaatacgttcccgggtcttgtacacaccgcccgtcacaccatgggagtcagtaacgcccgaagtcagtgacccaaccgtaaggagggagctgccgaaggtgggaccgataactggggtgaagtcgtaacaaggtagccgtatcggaaggtgcggctggatcacctcctttctaaggaagaaaaaagtagagagtttttactgttgtctattgttgggttatcaagtaacctaaaccttttggtggcgatgcgcttaggggtaacacccgttcccatcccgaacacgatggtaaagacctaagcggccgatggtactgcactggagacggtgtgggagagtaggtggccgccaaattacaaaagaatatgggcttatagctcagctggttagagcgcacgcctgataagcgtgaggtcggtggttcgagtccacttaagcccatacccatgggggattagctcagttgggagagcgcctgccttgcaagcaggaggtcacgagttcgactctcgtattctccacttggtttcgaaagaaaccagttatgtaccttgaaaactgcatatagtaaaaatcaatagatttagataaatatctaatcaagacatccgaggtaatgttaacaacattaacttacagtctgaagaaaacagacttaaaataaattgactatcaccaacgcatacaacgctatgtatgtgtggacattatcccattcccgtgggatgaggtcgagttggttatgctgataagagcgtatggtggatgccttggcactaagagccgatgaaagacgtgataagctgcgaaaagcttcggggaggagcaaatatcctttgatccggagatctctgaatggggaaacctacttgagcaaacctcaagtatccttaagccaatacataacttaaggaagggaacccggtgaactgaaacatctaagtagccggaggaagagaaaacaacatgtgattctgtgagtagcggcgagcgaaaacggaagagcccaaaccagcgtgcgtgcatgctggggttcggaccgcggaattgattcaacgagtttagcagaacggttttgggaaagccggccagagagggtgaaagccccgtaagcgaaagacgagttgacatggcgggatccagagtaccacgagacacgtggaaccttgtgggaagatgcggggaccaccccgtaaggctaaatactacttagtgaccgatagcgcatagtactgtgaaggaaaggtgaaaaggaccccgggaggggagtgaaaaagaacctgaaaccatatgtttacaagctgtggaagagctttatatgctcaaccgcgtactttttgtagaacggtccggcgagttacgctggctggcgaggttaaggactaaaggtccggagccgaagggaaaccaagtctgaatagggcgcatagtcagtcggagtagacccgaaaccgggtgatctatccatgtccaggttgaagttgccgtaaaaggcaatggaggaccgaacccacatccgttgaaaagggtggggatgaggtgtggataggggagaaattccaatcgaacccggagatagctggttctcctcgaaatagctttagggctagcctcatacgagtcttgcggaggtagagcactgaattcctaagggggcgtcaaagcttactaagggatatcaaactccgaatgccgtgtagatgatgtatgggagtcagacgatccgagataagttgggtggtcaaaagggaaagagcccagaccaacagctaaggccccaaaatgtgtgttaagtggaaaaggatgtgggatttcgaagacaactaggatgttggctcagaagcagccattcattcaaagagtgcgtaatagctcactagtcgagaggtcctgcgccgaaaatgtccggggctaaaacacactgccgaagctttggaattgagaattcaattggtagaggagcattcttaaagggacgaagcagtaccgaaaggagctgtggacttttaagaagagagaatgccggaatgagtagcgagaggaaggtgggaatccttccggccgaatatctaaggtttccagagtaaagctgatctgctctgggtaagtcggggcctaaggcgaggtcgaaagacgtagtcgatggataacaggttgaaattcctgtactatcctgtaacagaactgtggggacacaggcagagagcgtgagccgggaatggaaaaaccggtacaagcgaggtaggagaagagttggcaaatccgctcttcaatctgaagacgtgatgtggactgaaaataagtagggaagcacgtgagctgactgtcaagaaaagccgctattgtttgcaggatacccgtaccgtaaaccgacacaggtggatgaggagagaatcctaaggccgacgggagaagcattgttaaggaactcggcaaaatgactccgtaacttcgggagaaggagtgccagtaagatggccgcagagaattggcccaagcaactgtttagcaaaaacacaggtctatgcaaaaccgaaaggtgaggtatatgggctgacgcctgcccggtgctggaaggttaaggggagaggttagcgcaagcgaagctttgaacttaagccccagtaaacggcggccgtaactataacggtcctaaggtagcgaaattccttgtcgggtaagttccgacccgcacgaaaggcgtaatgatttgggcactgtctcaacaatgcacccggtgaaattgaaataccagtgaagatgctggttacctgcgccaggacggaaagaccccatggagctttactccagcttgatactgggattcggtattgcatgtacaggataggtgggaggctaggaaatggtaacgccagttgccatggagccaatgttgggataccacccttgcagtactgggtttctaaccagcagccgtgatccggctgggggacaatgtcaggtggggagtttgactggggcggtcgcgctccgaaagggtatcggaggcgctcaaaggttccctcagaatggttggaaaccattcgaagagtgcaaaggcagaagggagcttgactgcgacaccgacgggtggagcaggtacgaaagtaggacttagtgatccggtggtataaagtgggattgccatcgctcaacggataaaagctaccctggggataacaggcttatcactcccaagagttcacatcgacggagtggtttggcacctcgatgtcggctcatcgcatcctggggctgaagtaggtcccaagggttgggctgttcgcccattaaagcggtacgcgagctgggttcagaacgtcgtgagacagttcggtccctatccggcgtgggcgtaagatatttgagaggagctgtccttagtacgagaggaccgggatggactggccgctggtgtatctgttgtcttaccaaaggcatagcagagtagccaagccgggaagggataaacgctgaaggcatctaagcgtgaagcccccctcaagatgagatatctcataacgtcaagttagtaagaccccttgaagacgacgaggtagatagggcagaggtggaagtgtggtaacacatggagctgactgttactaataggtcgagggcataaccaaagcagtgataggtttggatgatgatgttggttttaactgtatgtagttttgaaggtacatagccttctgaaaattgaagaatggcccagtggctcagttggttagagcgccgccctgtcacggcggaggtcgagagttcgagtctcttctgggtcgttatgtgggatcttagctcagctgggagagcatctgccttacaagcagagggtcacaggttcgagccctgtaggtcccacttaacatggatggattcccgagtggccaaaggggacagactgtaaatctgctgcaaattgcttcggtggttcgaatccacctccatccattaaccgaaaggttataagccgatgtggctcaattggcagagcagctgatttgtaatcagcaggttatcggttcgagtccgatcatcggcttttctcttttgagaaattaatttaatatcgcgggatggagcagtctggaagctcgtcgggctcataacccgaaggtcgcaggttcaaatcctgctcccgcaactcagacttttatagtctatgcccagatagctcagttggtagagcagaggactgaaaatcctcgtgtcactggttcgattccggttctgggcatttttattttatgtaaacggaaagactgcgtataccgcagtcttttttctatattttattattagagaaagaactctaatgcagaagagtaactgtagatttatgatttgatgatagggagagattgatttggcaagcattggagatgtagcaaaattagctggagtatcaagaagcactgtttcacttgtgtgtaataataaaggatatgtatctgacgaaaccaggaaaaaaattgaaaaagcaatgaaggaattaaattatattccaagcgagcttggccgtaatctgaagatgcaaaaatcaggaattgtaggaattattgttccagatatcgcacatccctttttcagtacgtttattaaatacgcagagaaagaactgtattccagagggtataaggcactggtttgtggaacagctgggcgtgaagatgtagaagaagcttaccttcagatgctggatcgtagaactatggatggcgtgattatgggagctcattcattgaagaaggagagatatcttaagattgacaggccaatcgtaacaattgactgctatttggcggattatattccgactgttcatgtagataagaaacaggtggcggagaaagcagcatcgctttttctggagaaaagcagaaagaaagttgtacagcttgtaagttctcatacgattaagaactatgaggatgaaaaggagaaggtattccgcgaaatacttcagaagaaaggttgtgaagttgtagatatttctgttggatataatacatttactactgaaaagtatcaggatgctgcagttcgtgcatttgagacatgtaatgatatggatggaattcttggtgttgatatggctgcggctgcctgtctgagagaagcgcagttacgaggaagaaaagttccaaaggatctcagcatagttgcgattgatggaacgtatattacaaaaatcggaccagaaattctgactgcgattgttcagccaattgaagaaatggctcaaaaattagtgtccatgatcatctcgcaaattgaagggaaaaaaattgaagaggttgaatctatttttggcgtgacagtccaaagtggtgaaacatgttaaattacatgttactttttaccaaatatcacgactttaatttgttgaaaaatacagaaaacaaaaagaattgattaaattcattgacagcgaaatggtaatgatctattataatcaacagatatcgaaacgattcgataaacaaaaataacagtggccgataggaaatattccaaggccactataaaaaacaaacatatcgaatcgatttgataaaaacgatatatgttataatagcacaaataggaggtaatgagagatgaaaaaagatcctgtaaagacagcgcaggaaattctgaaagcatttggcggaaaagaaaatgtaatcagtgcgacacattgtgcaaccaggcttcgcgtggaagtaaaggatgcatctgttattgatgaagaggggatgaaagagattcagggagtagcaggttatttctcaaagagtggccagcatcaggtgattcttggaactggatttgtgaataaagtttgtgctgagtttcagaaactggcaggagtgacagctggagatgctgaagtaacagaaaatggggagaaggaaaaattatctttccagagtacaacaaagatgatttctgatatttttattcctatcattccggtacttcttgcaacaggtattctgatgggagtaagaagtcttcttgtaaatggatttggaattgagttatcaccatcttttgatacagtattttctgtattaacagacacagcatacacatttatcccagtattagttgcatggtctgcatgcaagaagttcggtggctcaccgatcctcggtattgtacttgggctgatgcttgtatcaccaactcttccaaataaatgggatgtggtaaatggagttgctgatccgttaagttttgtctttggaccgttgcatttaaatattacaggttatcagagttctgtaattcctgcattattcatgggattctttgcagcaaaactggagaagaagttacatcaggtgattccggatatcttagacatgctgcttgtaccattccttactttacttgtttcacttttggcaggactctttgttgtaggaccggttctttcaggaattgaaaaaggaatgacagatctgatccttatgatgctgaaacttccatttggaattggaggaatcgcttatggaggactgattcagattctctgttctgtaggtatgcatcatacagtaacaccgattattgtaagtatttttacagagactggtgtagattatattaacccaatgggatctgcagcaatcgcaggacagcttggagcaggacttgcaattgtcatgatgcagaagaataagcagaagagagctaatatgattccagctctgatcccggcattattcggaatttccgaacctgttatgtatggtcttacattcccaagacttaagccattcttcatgggatgtcttggaggtgctgtaggtggtggattcgcagcaatcgttggtttgtgtgcaaagggaaccggagcgtctatgatccctggtatgctgctttaccttcagggaggaatgattgagtatattattgtattactgctttctgtaggagttgcatttgcaggcacatggctgattatgaagaagaatccagaagcagtataaaggagtaaatttatgtttcagtatgatttttcaaatcatcagaaccggcatattcggattacggatatgccggctgaatattttcaacggatacaggagacaaccaggaaagatccgtattatccggtatggcacattgcaccgaaatgcggtctgatgaatgatccgaatgggctgtgtgagattaatgggatacaccatattttttaccaatggtttccggctggaccggtacatgggttgaaacactggtatcatttgacaacaaaagattttattcattatgaagatcatggtgtggcaatgtacccggatacagaatcagactcttacgggtgttatacaggaatggcattaaaagagggagaaaaagtacatgttttctatacaggaattgaaaatgaagagatgatcccatgtacctgttatgccagatttgatggtgagaaactgacagaccggaaaaagattgtagaaatggatccggatcagacgacaatgaattaccgtgatccatatgtctggaaaagggacagtgaatactggatgctgacaggagcagaaagtaaagaacatgaaggaattctgatgttgtacagaggtaagcaggcagattcatatgagtacgccggaagagtgagattacttcagaatggacaggaagcaatgttaggttacatgttggaatgtccaaattattatgaagagaatcaaaaaggagtgctgttttgttctccgatgggaatttcaagtgagaataaatatgattataaaaatgtgttctccgtagtttacatgataggaaaaccattggatacagaacgaaaagaatttcatttttcagaaatgtatgaacttgataagggatttgatttctatgcgcctcaatcgtatgaggatgaaaaacatcgaagaatcttatttggatggcttggaaattctaagagcgaatatccaactgataagaataattgggctcacatgttaacactcccgagagaaattcggatcgaggaagaaaggttggttcaacagccggtagaagagctaaagcaacttcgtgcaaatgaaagaagcattacagagcatataaaggttgaagaatgttcctttgagcttgaaggaaatacagaaagtgcgttttctatagaaataggaaataaagatggtaactgtttgactttcagcgcagatggggaagaatattgtctggacagaagtggtatgaccgaagtgtatgcggagaagtttggaacaatccgttatgcaaaacagttagagaagaaacagattgtccgggttatggtagatcattccagtattgagattttctgtgatcacgggaaaacggtatttacttcgagaatgtttatagatcatgtttcttatgtaaaggtgaaaaatttgagcggaaagttctatgatttgagaaaataagattgtgtctcgccatttagaatcgcctgaagcgatgtggcgagatgcatttaaatattaaatttaaattaaatttaaaatctgaaaaaagtgcttgcatttatataagacttatgatattataacttctgcgagtgtttaagggcgtgtagctcaggtggtagagcacttgacttttaatcaagttgtccggggttcgaatccccgcacgctcactgaaagaaagcagtaatctattatgattactgcttttaactttatataaataaaatatggcatcaagagaatctatcattattcagataggttctttttacaaataagaggttattatggaatatttatatgaaaaattaactgcatatggaaattcagattattatgcatttcatatgcctggacataagcgtaatatggagctcatgagagccaggttaccatataatattgatataacagagatagatggatttgatgatcttcatcatgcagaagaactgttgaaagaattacaggaaaatgcagctagaatatttcaagcggaagagacgcattatctggttaatgggagtacagtcggtcttttgagtgcggtgatggggtgtacagaacgtggtggtagaatcttgatggcaagaaattgtcataaatcggtatataatgcggtatatataaatgaattacgcccagtatatatttatccggagttttcggaagagacagatcttaatggtgagatccatgtagaccaggtaaagaagttacttgaagaacataaagatgttcaggcggttgttattgtttcaccgacttatgaaggagtcgtgtcggatattgaagcaattgcggaaatcgtgcatgaatataagattcccctgattgttgacgaagcgcatggtgcacattttggatttcattcatattttccgcaaaatgcgaatacacggggggctgatgtggtgatccacagtcttcacaagacacttccgtctttaactcagacagcattgcttcatataaatgggagatatgctgatcgtgaagggataagaaattatttgcatatgcttcaatccagcagtccttcttatattttaatggcatccattgatgagtgtgtccggggaatggatgagtgcagagaagaaatcatggacacttatgttgagtgtttgcagcaagcaagagagagactgaagcagttaaagaatataaaattaattgaggcagaacattatgaccggtcaaagatagtattatctgtaaaaaatcttaagaatacagatggggaagttttgaatggaaaacgatttcaggaaatgctgagatcttatcatttggagatggagatggcttccgggtcttatgtgattgctatgacaggaccgggagatacacaagaaggaatggacagattggttcaggcagtgatggagattgataaaaatattctgtgcgaagagctttcagggaatgatgaggatcatactataaaaaatatttcttatgaaatgattccattagaacaagcatattcttcctttgaagcagggagaatggaaggtgagagtgtgaaatggaatgaggcatcaggaagaatctcattggaatatgtctatctttatccaccgggaatcccaatgattgttcctggagagagaattacttctactattgtgcaaaagatggtaaaatataaagagatgggtttttccattgaagggctaagccaggagaattgtttattagttgcggggaatccagaataaagaaccgacaggctggaagtcgagaatacgaatccagatgcatgtttaagagcaggagaaaaagtatgggtaaaatattttatattatgggaaaaagtgcttccgggaaggatacgatttacaaagaattgatcgaaaagatgcctaaatttcattcaatcgttccatatacaacacgtccaatgcgtgagggtgagaaggacggagtggaatatttctttgtcgatcaggaacgatttgatgagatgatggacgaggagaaaatcatcgagtttcgttcttacaatacaaagtgtggaatctggacttattttacagcagatgatggacagattgaattgtggcagtatgattatcttgtgatcggaacaattgagtcatattatgcattgaaagaatattttggtgatgatgttatggttccattatatatagaagtagaagatggattaagactgtcgagggcgttagaaagagaacgggcacagacgaaaccgcagtatgcagaactgtgcagaagatttcttgcagatgcagaagatttctcggaggagaatctggaaagggcgggaatcaagcggagatttcaaaatattgataaggaaacttgtatggaagaaattttgcgagaaataaacgtgaatttatgatatacttaaatggtagttcatagttttgtaagaaaatgatgttaaaattatgaatatactattgttaggtggataattgtgagaatattatccgctaaagatgaaataagatacacggcaggtgatagaaatgagtagttttaaagatgtagtagggcacaaaaacataatcaagtatatttcgagcgcagttcaggctgatgcagtatcgcatgcatatattctgaatggcgaaagaggatctggaaagcggcttcttgcgaatctttttgctatgagcctgcagtgccagaatcgtgcggaagacggagaggcatgtggaaaatgtcagtcttgtaaacaggcacagagcggcaatcagccggatattattaaggtgacacatgagaaaccgaatacgatcagtgttgatgatattcgtacacaggttaataatgatatcgtgatcaagccgtacagcagtaagtataagatttatattattccagaggcagacttaatgagtgcccaggcacagaatgcattgcttaagacaattgaggagccaccggaatatgcggtgattatgcttctgacagagaatgcagaggctttactgccaacgattcgttccagatgcgttatgatgaaacttcgtaatattaaagatcagctcgtaaagaaatatctgatggagcagatggagattcctgattataaagcagatgtttgtgtagcatttgcccagggaaatatgggaaaagcgattatgcttgcgacatccgaatatttcaatgagattaaggaagaagttgtacatttacttagaaatattgatgagatgaatgtttcagaactgatggatgcagtgaaaaaatgtatgacatataagatggagattaacgactatctggatatgattgcaatctggtacagagatgtattaatttataaggcaactaagaatgtagacagagtagtattttctgatcagctgagatatatcaaggcgcgtgcaagtaagagctcttatgaaggaattgagaatattttggacgcaattgaaaaggcgaaagccagactgaaagcaaatgttaattttgaactgacaatggaactgctcttgcttacaataaaggagaactagatacatgacaaaagtaataggagtaagattccgaacagcgggaaagatttatttcttttccccgggagagtttgaaatcaaacagggagatcacgtaatcgtggagacagcacggggaatcgagtacggacgtgttgtcagtgcaccaaaagaggtggacgatgattcagtgattcagcctttgaagtctgtgattcgtattgcaacagagcaggacgagaagacggtagagaagaatcgtcagaaagagaaagaggcttttaagatttgtcaggagaagatccgcaagcatggactggatatgaaactgattgaagcagaatatacttttgataataataaagtcctgttttattttacagcggacggacgtattgattttcgtgaacttgtaaaggatctggcagctgtgttcagaacaagaattgagcttcgtcagattggggtcagagatgagacgaagatccgcggaggaattggtatctgtggacgtccattatgctgcagtacgtatctgacagagtttgcagcggtatcaatcaagatggcaaaggaacagaacctgtctctgaatccgacaaagatttcaggggtctgcggaagattgatgtgttgcctgacgaatgaggaagagacttatgaagtgcttaacagtcagttaccttctgttggagataatgtgacaacaagtgatggattgaccggaacagtacattctttgagtgtacttcgcagacttgtgaaagttattgttaatctggagaatgacgagaaagagattcgcgagtataaagcggatgatctgaaattccgtccgagaagaaagaaacagaaagtatcgaaagaagagcagaagaaacttgctgcacttgagcggatggagaagaaagagggagcttcgaagttagatgacaaataatctgagaccaggcgaacgtctggatgatctgcagcttggaggattggaattgatccagaatccttcaaaattctgttttggagtggatgcagtatttctctctgattttgcaaaagtaaagccgggagagaacgtgcttgatatgggaaccgggaatggaattatcccggttctacttgcaggaaagacgaaaggaaagcattttacagggcttgagatacaggctgagactgcagaaatggcaagacgcagtgttgcacataaccatctggaagacagaattagcattgtaaccggagatattaaagaggcggcagaacgatttaagccggccttttttgatgtgatcacaacgaatccgccttatatgttagcggatcatggacttcggaatccagatgacagtaaggcaattgcacggcatgaggtgttgtgtacactagatgatattttaagagaaagtatgcggcttcttcaggataaaggcagattttatatgatccacagaccgttccggctgacagagattttgacgaagatgcatgaatataagattgaaccgaaacggattcagtttattcatccgtatatagataaagaaccgacaatggttctggtggaaggaatgcgtggggcaaaacccagagtgacaatagagccaccaatcattatgtatacgaaggatgggactttactgcagaagaacggaaataattctgaaaaacaaaggtaactgaacagttacaaagtcatgggagatgaagatggcaggaacattatatttggtagcaacaccgattggaaatctggaagatatgacatttcgtgcgatcagaacattgaaagaggtagatctgatcgcagcagaagatacaagaaacagtattaagctgttaaatcatttcgaaatacagacgccaatgacaagttatcatgaatataacaagtttgataaaggtcgtaaactggtggagaagctggaagaaggactggatattgcggtaattacagatgcaggtacacctgggatctctgatccgggagaagaactggtgaaaatgtgttatgaaacagggattcgcgtaacttctgttccgggaccggcggcatgtgttacagcgcttacaatgtcaggacttccgacaagaagatttgcatttgaggcatttcttccgacagataagaaagagcgggaagaagttttaaaagagatggctgctgagacaagaacgatcgtaatgtatgaagcaccgcatcgtctggtaaagactttgaaacttcttgcagagcgtctgggagatcgaaaagtaacggtttgcagagaactgaccaaaaggcatgagacagcatttcaatcaacacttgaaggagcagtagcttattatgaggcgaatgatccgaagggagagtgcgtgattgtaattgcagggagaagccgggaagaaatccgtcaggaagaaaaagcgtgctgggaagatatgagcatcgaagatcatatggagcattatatttctcaggggctcgatcgcaaagaagcaatgaaaaaggtcgcgaaagaccgcggcgttcagaagcgagaaatttataattacctggagaagcaaaaatcataagaagcatgttttgagagttgtctgggtaaaaaatgagaggacagcttaaatgctgtcctcaattacttttccgtctttcataaagatgatacgagaattcagggaaacggcttcttcgtagttatttgtgacataaagaaccgtgattccaagctctttgttaatcttgagaatatcatggatcatatctttccgaagatcatcattctgatgagcaaaatcttcatctacaagcagaacttttgggtggcagacaatagcacgtccaagtgcgacacgctgacgttcagaatcggaaatagaacggatctttttcgtaagaatgtctgaaattccaagaaaagcggcagcagtctttacgcgggtattgataactgtacgcggaagatcacgaagcttcagtccaagtgccatattatcatatacattcatgtacttgtagagagcgtaattctgaaatgccatggcaagcttccgatcgcgtggaagaatgtcatttaaaaaggtattatcaagatagatctttccggaagtaatatcttccaggccgccaatcatccgtaaaattgtagattttccgcatccgcttggtccgtggaatacaacaaattcaccgtcctcgatcgagaggctgacatcgtctacagatacgaatccgttcggatatacttttttcaaatgttcaaatattaagctggccatacacaacgcctcctgtatcttatatagttgtattttatcacaaataaagaggggatgcattactgtttggaaacaaatttcagcgatgtataaataaggaagccaatgcataaaattagagaaataactgtcggagtctgctatgttgattcaattttggaaaaggcggaagaagcagtgtgtaagtattgtatgtagtatcagtattcttttcagttctattttctttttaaacggttgtgaagcaacatttttagaagaaaaaaagagcagtaaagaggtggagaatgaaagatttacattgtttacagaaaaattgttttgcaaagaggtggctgcaagccagatcagtctgcactatacattaaaagagccagaagcgtatgggattgataaagcggatacagcatatggaacgatacagacagacagtactcagattaagacagcagcggagaatatacagcaggcattgtatacattttcttatgaaaaactgaatgtaaagaataaaattacatacgatctgttaaagcaatatctgagaagtttgagagaagaagcggattatctgtattatgaagaaccgttaaatacagtcaatggagtacagacgcagattccaattgtattatctgaatatcagttttatgacaggacagatgtggaagagtatctggatgttttaagtgagacaagggattattttcaacagatcattgcatttgaaagagaaaaagcagacaaaggattgtttttgtcagatgaaatggcggatcaggtgttagaacaatgtaatgcatttcttgcaatgggaaatggaaattatctgtactcgacatttgtgtccagaattggtgaattacaggaactgtctgaaaaagaaaagagtgattatattcagcagaacgccaggcagatggaagagcaggtttatccggcgtatgaggatttgatacaggcggttaaggaattgaaagggaagggaacgaatgaaaagggattgtgttattttccggaagggagaaaatactacgaatggtatatacagcagagtgtaggagtgacagacacgattcaagagcttgagcaactaacgcgcagacaaatttcagaagatattaccggtatggaagaagcagtcaacgaagcgaagcaggcagcaacaatattggaagatgggaaagcagaaagaattttagaaaagttaaaaaaagggatagggactgcatttcctgagattccaaaaacttctctgcggataaaatatgtaccggaggaaatgcaggaacatttaagtcccgcattttatatgataccggcaattgactatacagaagaaaatgtaatttatgtaaaccaaacacagatgcgagatgatttggcactgtttacaacgttggcacatgaggggtatccgggacatctgtaccagacaatattttttgaaagcacgaatcctgatcccatcaggagtattttaaattttggcggatatgtagaaggctgggcaacttatgcggaaatgtgcagctattatctgatgccgttatctaagactcaggcagcaattcttcagaagaatagttcagtgattcttgcactttatgcattggcagatatgggaatccattacgaaggatggagcagaatggatacagtagaattttatgcaaaatatgggattaaagatgctgaaacggttgataaaatctataatctgattctgggatcgccgggaaattatttgaaatattatatcggatatataaaatttctggagttgaaaaaggaatggataaaatctggaaatcaatcccagaaagaattccataaagctgtgctgagtgtgggtccggcgccttttgaaattgtaggaaaatatttttctctgtgattcattctgtgttataatatccacaggcacaaaataataagaggcggtgtctcaagaaaagagtcactgcttttttcatttattatagagaaactatttagaaagacaggaggacgtgaaaaatgaaattaatgattgcatctgacatccatggctcagcattttattgtgaacagatgattgaggcttataaaagagaaggcgcagacaaattattattgttaggagatattctttatcatggaccgagaaatgatctgccggaaggatatgcaccgaaggaagtgatcgcaatgcttaatccaatgaagaaagaacttctctgtgtgagaggaaattgtgatacagaagtggatcagatggtattggagttcccaattctggcagattattgttatctgaatctgtcaggagatccggaagaaaagaacagtgatgttacaatatttgcaacacacggacatgtgtataatccacataagcttccgatgctgaaagacggagatattttgttgaacggacatacgcatattccggcatgtgaggaaatccttgatatgaacggtggaaaatatcagtacttaaatccaggttctgtctcgattccgaaggaaggatccgagcacagttatatgatttatgaaaacggtgtatttacatggaagaatcttgcaggagaggagtatcagacatggaagaccgtttcgcactcttaatcgatgcggataatgtatctgcaaaatatattaagccaatcctggatgaattatctaaatatggaaacgtgacttacaaacgaatttacggagactggacaaagtcaaacagtgcgagttggaaggaagaacttcttcaaaattctattacgccgattcagcagttcagttatacacagggaaagaattctacagattctgccatgatcattgatgcaatggacatgctctatacaagtgaattggaggggttctgtctggtatcgagtgacagtgattttacaaagcttgcaagccggcttcgtgaaagtggaaagatggtaatcggaatgggcgaggacaagacaccgcttccgttccgtaaagcctgtgatatcttcaccgtattagaggtgcttctggaagacaacacgatagagaaggaagagagtgaaggaaagttttatcatccgcatgtgtttggaaggggacagaagaaaatttccggtgcttcattatcatcgtcgaatggaagaggttcaaaagaaaagattgaaaaggtatcaaaggaaaaaatagaagaaatcgtggttaagatcattacggaaaaccagaataacgacagggaaaccgggcttggtgaagttggaagccggctggttaaagtatatccggactttgatgttcgacgttatggttacagtttgttatccaagttccttgaaactttaccgaaattaaagctgatccaggaaggaacgaaagtttcggttactctgtatgaagataagagtaagaaagatatgcttgaagagtatattatccgacagatccagatgacaggggatcaggggatctctcttggaacactggggaatcgaattcgtattcagtttggtgattttaaagtacgggattatggatactcacaatttaagcagtatatacaaagttttccaaaggtagaattgatcgaagatggagagcgtacccgcgctgtttatgtggaagattaaaagtagagagaataagatacagaagggggtgctgattaatgataaagaaatggaacgcagtatgttcctggatgcttacgttattcttacttggacatatgcttaccatgtccattcctgtgttgacaggtggacaggattattctgattgtcagatacttgcaggagggattgtggcgacagttttgattcatgtagttttttgtattgtaagttattatccaagacgtggagtacttaattttcacagatacaggaaagagaattggagattaattacgcagagaatcagtggaattgttatactgattttattgtatccacacatgagagtacttcatcttataataagtggagcatcattttctggtggagcaaagtttcttgtattagtgacggagattctctttgcaggtgcggcatttctgcatctgagtgtatcgttcagccgttctatgctgacgcttggtttgttgaagaacgataggatggagaagcttgtggattatgtaacatggatcatctgtggattattaatggttcttacggtggctgcgcggataagattgtaggaataggtgagatttttaggaaagagaagatgacaaatgaaggtattgattataggaaatggaattgccgggatgtctgctgcaatagaagcagcagaacttgatgatgaggtaattcttgtatcaccggttcagtcagaacgtacacagtcagttatggcagcagaaggaatcaatgcagtagttgataccgcagaggaggattctgtagtgtggcatgcgaatgatacgctggagagtgggtgttttcttgaaaaagaagaggatgtgagaaatctctgtgagaaagcaccggaacatctgaaatggctggatgagatgggagttctttttgatcgaaatgaagatgatacatggaaagtgaaagcttccggaggacagagtagaaaaaggactgtttattcaggtaattccattggaaaacagattgttacggcaatgacacagaaatgcctggagtatgagattaaaggtaaaatagaaaagaaaatcggattgtatttttattccgctcttattcgggatgaaaagtgttatggagcgttattttataatccagaatctaaaatgttgattccggtttatgcggatgcagtaatctgtgctaccggtggaatgaacaagctatatggaaaaaccactggatctgaattaaatgatggttatgtgacaggaaagctttttttacagggagtgcagctgagaaatctcgaatttatccagtattatccgaccacggttcagagaggaaataagagggttataatctcggaatctgtcagaagtgaaggttggagactttattataagaatagaagtcacagtgtttatttcatggaagaaaagtatggtacggaaggcaatctgatgtcaagagatcttgtcgcaagagaaattgcaatgtgtcccggacaggtttatctggagaatgcaaaagaatcgatccctgtaacgccggcaatccatttctttatgggtggtattaaagtggacggaatgcatcagacgaatattgcaggattgtatgctgtgggagaagctgcgtcaaaatatcatggtgcaaattgccttggtggaaattcattgatgacagcagttcattcgggaagaacagcagcgcatgcggtgcatgagggacagggtcagccgatgtgtgaagaattgtttgttccttatattgagcatgagcaggagaaaattgagcgtatggaacagatgtcagagtatcggggcaagtattcagcgacagcaacactgcgtaaattaatgaagatcatgagttatggcatggatttgatccgtgatggagaagttcttcaggatagtatttacgcattggattccagcttgaatgagctgaggacatttccgattgatccaatggtatctgtttatgaaaattacagattatatccgatggctgttcttggaaaagcgacacttatgagtgctgtggaaagacgtgaatcaagaggagctcatttccgaaaagattttccaggtgaaaaatcagaattcatgaaatgttccgttgcagagtttaaagacgaaaaaatcaggatttattttgaacaggagtcaggagaaaagggaggcgctgtgagatgaaagtaagaatcaaaagacaggatgaccgaagatcagcgccgtattggcaagtttttcatttcagaggagagggaagaattacagtagccgcgattctcgagaagttaaatgaacgtgaccagctggaagatatcaaaggaaaacaatgtagaaaaatccgttgggaatgtggttgtatgcagaaaatgtgcggaggttgtgcaatggtgatcaacgggcatccggcattggcatgtggagtgttcattaatacagatgatacagagattttaaggctggaaccacttacaaaatttccggttgtggaagatctgattgttgacagatctgtaatatgggaacgccagaaggaagcactgatgtaccttggaattcggaaacatccagatccgaaagagcatgatcatcagtattcggcagcaaagtgtctgaaatgtggactttgtctggaagtatgtccgaattatcttggggcaaaagatgatttctatggcgcagagtttgcaaataatgcgtatcttctgcattcttccagtctgaatcgaaagcgggcattggagaaacagtatgaagaacattttgcgaagcaatgttcgaaatcactggcatgcagagatatctgtccggcgcacctgcagacgttgtcgtcgatttcttatatgaatagaagatagaaatgagtcaggtattattcgctgaatgcggtttctcagtgggaaatgcaaggagaacttaaagaaaatggcagaaaaagagaattaaaatctataaggggcgggtacagtacaatgtatccgcctttaaaaataatgagttgttaaataaattgattggcataacgattaataattcttcaaatatctaataaccttttcggtcacagcgttctgatactttccttttctccagataacaccaatgcgctgttcaattgcaggaaagacaggtattccgacaagttcaggatacatatccaccatagacttatacaaaaaacagccaatatgattagtctttaccatattgatcagcgttgtgatctgactggtgttcagaacaatgtgtgggtttactcctgcggccttgaactgacgggtcagtgtcataacctgaacagaatcagtgttaaacagaaccaatgactcatcagtcagcatgtttaaaagaagcgtggattgttctgcaagtggatgatcctttgatacgcagaagagcagatcttcattatcaataatatgaaggttgcatttatcaatcgcagactgttctgcattgacaatcgcgaggtcaagtttctcctccagaacaagttcacaggctttgattgatccatattcatataggcggaaatctacgtcagggaattcttccttcaaagaaagatacatatccggcaggtaaatggttccaagcattggcgggattccgatgcggacaggtgtaatctgcttacggagttcgtgcagttcagatctgacagcatccgcatgagccaaaagttcttcggcattttgatagaacttttcaccttccggtgtcagagtcagtttattattgtttctatagaaaagattcacgccgaattcttcttccaaagctttgatcgcgttagataccgaaggctgggtaacaaaaagctctttggatgcgcgggtgatgttgtggtatcttgcagcaacacagaaatattcgagttgtgtcagtttcatttgtaaaaacctcctatatctaaattattgcgtactaaaggtttccatagttttttcttatagtaccatatttttttcagaatgtacattttcgattgtattttctataatacaaccatagcagagaggtaatcgaaacggccggaaattacttaaagcgaagctaaaaataatagctgaaaaagttaagaagtaaaagaaaaacagaaacaaaggaatggaggaaaacatatgagtccatcaacaataactcttctgtttctcctgtttgcggtaatcatgtttgtattagaaaagataccgcttggagtaacatcaatgattgtctgtatcggtcttgtagtgactggggttttagacgtgaaaacagcctttgcagggttcattgacagtaacgtaatcctttttgtagcaatgtttatcgtaggaggtgcgttatttgaaacaggaatggcgaataaaatcggaggaattgttacgaagttcgccaagacagaaagaatgctgatcattgcgattatggtgatcgtaggattgatgagcggaatcctgtcaaacacaggaactgcagcagttctgattccggtagttatcggaattgcagcaaaatcaggatacaaaagatcccgacttctgatgccgcttgtatttgcagcagcaatgggaggaaatctttccctgatcggtgcaccgggaaatctaatcgcacagagtgcactcggtgaaatcggactaaaattcggattcttcgagtatgcaattgttggtatgccgatcctgatcgtaggaattattttctacgcaacaattggttacaaactgcttccaagtcacgatgtgaaggatgacggagcttttgatacaacaaagaatttcgataatgtgccgaaatggaaacagtggttatcactgattatcctggtatttacattgctggcaatgattttcgaagataaaatcggtatcaagctttgtatttccggtggaatcggagcactgcttctgattcttacaggagttatctcagaaaaagatgcacttaagtcaatcgatcttaagacaatcttcctgtttggtggtacactttccctcgcatctgctcttcaggagacaggagccggagaagtgatcgctaataaagtaatcggagcgttgggtgcgaacccatctccatatatcctgacacttgttgtattcctgctgtgttgtatcatgacaaacttcatgtcaaatacagcaacaacagcactgatggttccaatctgtctctcaatcgcacagggaatgggagcagatccaagagctgtattgatggcttgtgtaatcggtggttcttgcgcatatgcgacaccaatcggaatgccagcaaatacaatggtggttggagccggcggatacaagtttatggactatgtaaaagcaggattcccattgatcatcattgcaacagttgtaagtatgattatccttccaatcgcatttccattcttcccgtaagaagacatgttgttggaatgagatataaaagaaactataaaacatgaactaacctaatcatcaaagttactggaaattgcagcagtaatgaaaggagacctaaaaatggataaaaaagcacaggtagagcagcttactacttatatggcgaactttgtttcctatattggtaaagtactgccggatgacatcaaagcaaagattgacgagcttgcagaaaaagaagacagcccgctttcaaaggttatttatcagacaatgcagaagaaccaggttcttgcaaaagagctgaacagaccaagctgtcaggacacaggagtattacagttctgggtaaaatgcggaacaaacttcccactcattggagaactggaagcactcttaaaggaagcagttgtaaaggctacatttgaagcaccgcttcgtcataacagtgttgagacatttgatgagtataacacaggaaagaatgtaggaaaaggaacaccgacagtattctgggatatcgtaccggacagtgatcagtgcgaaatctatacatacatggcaggtggtggatgtacactgccaggaaaagctatggttcttatgccgggcgaaggatacgaaggagttacaaaatttgttcttgatgttatgacatcttacggattgaatgcatgtcctccgctgcttgttggtgtcggtgttgctacatctgttgagacagcagcattactttccaagaaagctcttatgagaccgcttggaagccacaatgaaaatgaacgtgcagcgtctatggagaagctgcttgaggatggcattaacgcaattggacttggaccacagggaatgggcggaaagtattctgttatgggagttcacattgagaatacagcaagacatccatccacaattggagttgctgttaatgttggatgctggtcacacagacgtggacacattgtatttgataaggaccttaactacacaatcacaacacattcgggggtgacattataatgctggaaataaaagatggaaaaaagattttaacaacaccagtctcagctgaggatctcaaagatattcatgcaggagatatcatttatctgaacggaagcatgacaacttgccgtgacgttgcacacagaagactcgttgaagaaggacgtgagcttccggttgatgtaaaagatgcagcaatcttccatgcaggcccgatcatcagaccacttgaaaatgataaatttgaaatggtttctgtaggaccgacaacaagtatgcgtatggaaaaatttgagtatgaatttgtaaaagagtccggagttcgtgtgatcatcggaaaaggtggaatgaaagaaaacacagagcgtgcatgtaaagaattcggagcaattcattgcgtattcccagcaggaaatgctgttgttgcagcaacagaagttgaggaaatcgttgatgctcagtggagagacctcggaatgcctgagacactgtggcactgccgcgtaaaagagtttggaccactgatcgtatctattgatacagagggacgtaacctgtttgaagagaacaaagtagtcttcaatgagagaaaagaaaaagcgatcgaagaaatctgcaaacatgtaagctttattaaataagtcatgccaggacattaaagtttactcgaaaaatctgagccactcatgcctgaaaagcgactcagatttatgaaatcagaaattaaaccaattttactgccatgtaaaaatataccataaaatataagccaaatgatctgttcggccagggacagataaaaaagatatcggagcacacgaaaaatgtaagtgtgtttcgatatcttttttgttttgcaaaatctatttattttgttccgaaaatgcgatccccggcatccccaagtccaggacagatgtaagcatctttgttcagttctctgtcaatatgtcctacgtacagctgaatatccggatgtgcttccatcagacgttctacgccctccggagcagcaatgatagccatgaatttgatcttctttccgccatgttgtttgataaaatcaacagcagcaacagcagaaccacctgtagcaagcataggatctgtaacaacgatcagacgttcagagattgggtttggcagtttgcagtagtattcgtgtggctcatgtgtctcctcatcacgatacagaccaatatgaccaatctttgcagtcgggactaaagcctgaagaccgcttaccattccaagaccggcacgtaagattggtacaatagcaaagttcttgcctgcaatctgtggtgttatacatttttcaattggtgtttcgacttccacatcttctaatggaaggtcttttaaagcctcatatcccattaacatagcaatttcttctaccagcgcacggaattcagcagttcctgtatttttgtctcttaatcgggaaatcttatgctgaatcagtgggtgcttcatctcaattacattattcattttgaattcctccatccattttctgccccctattataacgagtttcttgttttgagactacccctttttttaataaaagggactttcgaacaagattattgaaagtttgtcgagttttatttcatgcaatgaataggtagcttgagttttacaagatattagagtaaagtaatattaaaagaagtcaagaatttctacaggtactgttcaaggtagttgtgccctcaatggcataagatatgaagtggtagagaggtgaaaaaattatgaaaaattattcagaagatccgagcagacaataccatattcaggtagcaaaaggagaagttggacgttatgtgatcatgccgggagatccaaaacgttgcgttaagatcgcacagtattttgatgatccggttttggtagcagataacagggagtatattacttatacaggaacattggacggagtaaaggtaagcgttacatctacaggtattggtggcccgtctgcatcaatcgctatggaagagctgtataaatgtggagcagatacttttgtaagaattggaacatgtggcggaatgcagacagagattaaaagtggtgacgttgtaatcgcaacaggtgcgatccgtatggaaggaacatccaaagaatacgcaccgatcgagtatcctgcagtagcagatcttgatgttacaaatgcattggttgcagcagcgaaagagaaaaacttcacacattatacaggtgttgttcagtctaaagacgcattttacggacagcatgagccagagaaaatgccggtaggatatgaacttatcaataaatgggaagcatggaagatgatgggatgccttgcatctgagatggaatcagcagcaatgtttatctgtgcatctaaattaagagcaagagcaggttcttgttttcttgttgttgcaaatcaggaaagagagaaacttggtcttgcgaatccagttgttcgtgatacagatatggcaatccaggtagccgttgaagcaattcgcaaattgatcaaagcagaccaggaaaacaaataagaaaacaggtagtagcatatgaaagaaaagaggaggctgtgatggaacaggttatggttgagaaattgatcgatacagcgattgagcaacttaagttttcctatacaccttattcgaattttaaagttggggcagcgcttttaacaaagagcggaaagatctatacaggatgtaatatagaaaatgcatcttatacaccaacaaactgtgcggagagaactgcattttttaaagcggtaagcgaaggtgttcgtgattttcaggcaatctgcattgtcggtggcaaagatggaaaattgacggaatacactgcgccatgtggtgtatgccgtcaggtcatgatggaattctgtaatccgaagacattccagatcattcttgcagtggataaagaacgatatgaaatttatactttagaagagctgatgcctcttgggtttggaccattaaatttggtataatatatacgaattaaaagctgacgaaggaagggggatttaacaatgacaagggaagatattataaaattgccaaaggtggaattgcactgtcatctggacggatcactgagtcgggaatttgtggaaaagagattgggaagacaggtgggaaaagaagaactgagtgtgtcaaatgactgtaccagtcttgcagaatacctggaaaagtttgatctgccggggcaatgcttacaagatgaagaaggtcttgaagaagccggttatgatgtgcttagaagtatgaaacaggagaatgtgatttattctgagatccgtttcgcccctcttctttcagagacagatgatatgaattgtaacaaagtgatcgaagcagtcctaagaggtcttgaaagaggtaagaaagagtttggaattgacttcggcctgattgtatgtgcgatgcggcatcacagcgaagaaatgaactggcgcatgatacgtacagcgagagaatatcttggctcaggagtgtgcgcagcagatcttgcaggtgcggaagcttcctatcctatgtcagagtttaaaaatctctttcaaaatacccataagataggaatgccatttacaatccatgcaggggaatgtggaagtgctcagaacatcatagattccgtggaagctggggcaagaagaatcggtcatggaattgcaatgagaggacatagtgatctgatcaaagaacttgccaaaaaaggaatcgggatcgagatgtgcccaatcagtaatctgcagacaaaagcagtagcaggaccggaggaatacccgatcagagagttcttgaatggcggtttaaaagtaacggtcaatacggacaatcgtacggtcagtgatacaacaatgacaaaggaactggaatttattcaaaacacatacggaatccaagatgatgaaatctatcttttgatgaagaatgcagcagatgtggcttttgcggaagattatgtaaaagataaattgtatcggataatgagggaagtttatggcgcataagtatttacacgaaatgttaccggttttcaagttcagaaaacaaagaaaaggagagtgaaaattatgtataagaaattaattacatgtcttgaaagtgtaagaaagaagatcgattttaaaccagaagtagcactgatcctcggatccggacttggagatttcgcagatgggatcaagattgagcagaccatcgattatacagagattgaaggatttccggtttctacagtaaagggacataaaggccgttttgtatttggttatgtagaggatacaccggttgtgatcatgcagggacgtgttcattattatgagggatataagatgtctgatgttgttcttccgacacgtctgatgggaatgcttggggcgaagaagatccttcttacaaatgcggcaggtggatgcaatccatcttataaagccggtgatttcatgatgatcacagatcacattacaacaggagttccaagcccgttgatcggaccgaatatagatgaacttggaacgagattcccggatatgagcgaagtgtatagcaagcgtcttcaggatgtgatccgcaagtgtgcagcggagtgtggcgttgagattcaggaaggtgtttacgttcagtttacaggaccgaactatgagacaccggcagagataagactcgcacagagctggggcggagatgcagtcggaatgagcacagcatgtgaggctatggcagcacgtcatatgggtatggaaatctgcggaatttcctgtatcacaaatatggcagcaggaatctcaaaagtggaactgaatcataaagaagtacaggagacagcagaccgtgtagcaaaatcatttaaggaacttgttacaaaggtcgttgtaaacatgtaatggggtgtgacttttatgaaaaaatataatcgaatttttacaattgtaattgattcctttggtgcaggagcaatgccggatgctgcagattatggagatgcaggaacagatacaatgggacatatttctgagtctgtggatgaatttcatattccgaatcttcagaaactcggaattgctaatctgcatccactcaaacaggtggcaccggtagaaagaccgatgggatactattctttcctgaaagaagcaagtaccggaaaggatacgatgaccggacactgggagatgatgggacttcatatcacgaagccatttaagacatttacagagacgggatttccgaaggaattgattgacgaactggaaaagagaacaggacataaggtaatcggaaacaagagtgccagtggcacggagattcttgatgaacttgcagaagaagagattgcaacaggtcatatgatcgtctatacatctgcagattctgtattgcagatctgtggaaatgaggagacattcggactggatgagctttaccgctgctgtgagatcgcacgtgatattacgatgaaagatgagtggaaagtcggacgtgttattgcaagaccttatgttggaaagaaaaaaggtgagttcaagcgtacaagtaacagacatgattatgcgctgaaaccatacggaagaacagcacttaatgcactcaaagatgcaggatatgatgtgatctcagtcggtaagatttttgatattttcgatggagaaggtctgacagaatcaaataagtccaaaagttctgttcatggaatggagcagacgatcgaaatttcaaaaagagatttcaaaggtttgtgctttgtaaatcttgtggattttgatgcattgtggggacaccgcagaaatgtgaaaggatacgcagaggaacttgaacgatttgatgtgaaattaggagaatttcttggtggattgagagaggatgatcttctgatcattactgcagatcacggaaatgacccgacgcacacaggaacagaccatacaagagaaatggttccgttttttgcatattctccatctatggaaggatacggaaaactgccggattcagatacatttgcagtgatcggtgcaacgattgtagataatttcgacgtaaagatgccggagggaacgatcggagcatctatcttagatgaactgaaatagaatagctgagaacgaaataatacaaaaagcaaattctttggagtttgctttttgcgttttacggaagtgaaaaaatgtagtatagtaaatttgaattgagcggtacggcaaaatgcggaggttgataatttccaccttaaggtaatgaagtttagaacaaggagacagagaaaaatggatgaaagattgaaacgacagcttgattttgcattggaaatagataaggaaaaaaatattctgagacagacacatctctcagagcatggcagacgggaaaacgatgcagaacatgcatggcatatggcgatcatggcatatcttttcagagagcattcaaacgaatcggtggatattgcaaaggtaatgctgatgtgtctgatccatgatattgtggagatcgatgcgggtgatacgtatgcatatgatacagaaggtttgaaaactcagaaagcaagagaagatgcggcgaaggaaagaattttttcaatccttccggaagatcagaaacaagagctgatttctctttttgatgagttcgaggcatttgaaacagcagaatctaagttcgcacatgcaatggataatctacagccgctgatgctgaataacagcaatggtggaaatgattggaaagagcatggagtatgtgcagatcaggtttatggtcgtcagaggaagacgagacttggatcggaaaaaatatttgaagttgtagatcagattatccaggaaaatgtaaaaaagggaacaattaaagagtaaaatgtgaataactttcttataaaatgagaggaatgtggaaaagaatagcagctgtctaacaagtgtgttgtgagaacagctgctattctttttgagagggcaaaaatcaggtgaaaaactatttataatccattaccagaaacattggcttgattgcaacgatttcatcatactcttctttttcaactgttacattagaattcagagctttcaaatcatcttttaaaaccgtgagtgcttcaggaatcgtttgtgcacggccatccttcatgatatcctgcattctctttaatacgaacggatgtgcgtaatgtgctggaaccggaaagtcaggatatttctggatataggcttccatttgctggatggatcgttccagctgattttcgatatattttttattgtttttggaggttggcaatacattcgctccggcgaacagaaaaattgctgccaatccaaataacaggaaatacataccgaatccggcatgagtcagaagggagtagattccataaaggaatgctccgatgcccaatattacaacagcaagagcgacccatttataagcgggattgcttctgtcataggttctctttttcttcgccgacaggctcagatccatgtagtaatcggattgctttttaagataattttctgcgcgttcaagcttggtaagccgctttttgatttcttccggaagaatgcgttcgcgttgcttttcttccagccattttcttttttcttccagttttcgctcggcttctatgctgtgcagcggaatctgaggaaatctttcttcaatataagccaaaagacgatccacatcttcttcatgtttgaagttacattgtttttcttttccattttcatatacaactacgagataggataacgttccaaatgctccttttcctgtaaaaccacctttgctcatggcaattcttttaaatattctttctatggaagaaattggtatgtaataacatctgtcaaaataaaaactgtttaaataaattgctttttccccaacaccgcaaggacctatttttttgcagttttttttgtcagtggttaattcagcatccgggattgttacagttccaagtcgttgtggtttaaacataatatcatctcatttcatttgtatattttaaaagaactgtgaaaaacatgatgtctgtctgtttttcacagtcctatagtcttaagcctgttttctggcaggttttcttgttgcccagataaagattccaaggaacaatgctgccaggataattcctacaggataagcaactgctgtagagaatcccagacattcatctgcacagaagaaataggtcatggaaacggcactcataaatgttgcaggaactgctgtgatccagtaattcttcttctcacggaacaggtacatacttgctgtccacaaaacgatcattgctaaagtctggtttgtccagctgaaatatctccatacaatggcataatcaagatgtcctacaaaagcaccgactgccagaagcggtacacagagaatcaatcgtttctgcattttattctgatcgatcttgaaccagtctgcaagtacaagacgggcacttctgaatgcagtatctcctgaagtaatcgggcatacgataacaccgatcattgccaatgctacaccgatgcttcccattgttttaatacaaacatcataaatagcggctgactgaccatttgcaagaatctcacttaatccagtgtttagaccaccggttactttgtaaattgcacaacctgcggctgcccagatcagtgcgatcacaccctcggctaccattgctccgtagaatacgaaatgtccctgtttctcagatttcatacaacgagccatcagaggggactgtgtagaatggaaaccagaaatagctccacatgctacagtgataaacatgaagctccagattggttttccgtcaggatgcatatttgtaaagtggctccagatttccggaattgtataattcggatttgtgaagataccgatgataacaccaagagccatgatgatcagacagataccaaaaatcgggtagatgcgtccgataatcttatcaatagaaataaaggtcgcgataaaataatataacaaaataatccaaagccagaattcaggatttgcaagaagtccggtgatacctttgttcccaagcaaagtgacgatcaagccggcaggacctactgcaaatacagtaccaaccatgacaagaagtactacactgaatacacgcataacatttttcatgacatttccaagatagattccacatacctcagaaatcgatgctccgtcatttcgttcagaaagcataccggagaaataatcatgcacacctccggcaaaaattgtaccgaatgtaatccaaaggaatacgaccggtccccataaagcaccctgcatggcaccaaaaataggtccaagaccggcaatgttaagtaattgcacaaggaataacttccattgcggcataacgacataatctactccgtcattgattctgacagcaggagtttctctgtcgtcaggtgcgaatgtgttctcaaccacctttccataaacaaaatatccgccaataagtaacgctaaacaaataataaaactaatcatacaaacacctccagaaaacataaatgttagcgtttttcaacccacttatattataggattgtttataaaaatttcaagatttttagataaaatttatataatttctctaaaaaaatcaaaaaaagtatcatttgtagctccatgactggcgattgtcgcatcggattgttataatagatgaaataaggtcatcatgtttggcgtgctgataagaaatatgcaatgaaaaacacagagatacattttcgtggagggatacgttatgataactttaaatgattatctgtattcgggcgataccatttttaaggtgctgcagaattacattacagatctaaggggagatgcacgaaagacaaaaaatgaaattgatttgatacattgtaatttcctgattcagatcagagaacttttggaacataatgaattccttacgacccagtcacagcaggttcgggaattctataaatatatgacaaaagaatatccatatcttgcatttacagtaaagggaagaatcaagtcgttgatccgtgcggaagagaaatttaatggttatattgtcaagtatatttcagattattacgaagaatatggaaagtatccgacaacggcagagttaaagcgcagtcttagctgctttcgtgatctgatcgcatatcgaattgtgatttctatgccaaaatgtcattatgaaaatgaagaagagcgtcagatcgcagaactggaatgtctgtacgggatagcgaatgtactaccgggctttcttgaggaaagagggtttacagcggagccggcaaatggtgtgatggaaagtcattccccactcatggatgacaatgtcagaccatattacagagactatatttcagacagccagccggatgaataccagtcactgcacattacattctatgataactgttcaagaagttatattgaggttcagatccgtacaaagcaaatggatgatattgcagagattgggccggcaaaccatctgggatatgagaaaaaacaagagaaagagcgcgccagaagaaatgcgattccaagaggtgagtgcatttattttgatgaggcgtatgagcgcggaatgaagctgttgggattggatctggcaaagctggatgtaaatatgtttgcagcgatgaataacagtttgatcaatgacgggtgtggattgtttcgaggaagactgatcttgccgtatgagcatttgtcgagatttcagaatgatctgattgattagaaagaaggaattacaaaggagaaagtgtttgatgggggacaacaagaaaaaatggttatggattagccttggaatagttgcaggaatcttggctttagggtacataggaaccgctttgtattttatgagtcattttcttccaaatacaaaggttaacgggaaagatttttcatatgctaaggaagaagatgtggcagattatctgaaatcagaagttaagaagtatgaattgaagattacagaacatgcgggactttctgatatgattacaggaaaagagatctctgttgaatataaagagaatggagtgatagataaactattaaaggagcagtccgtttttctgtggccggcagcatggtcgggagagggaaaaggattgtccatcacggcaagtgcagattatgatgagaaagcattagatgcgaagattgcaagtctgacagctatgacaacagaacaggtacagccgatatcttctatgccggtgtttaacggagaaaagtttgttccgggagacattacggaagggacggcaatcgatgcagatgcattgaagaaagcggtagtccaagcgatagagggactgcaagagcagttgaatcttgatgaagcaggatgttatgtacagccgccatatacaaaggagtcattggaagttcagcaggcgtgcgatgcgatgaatgcatacctgaatgcgagtgtaacttatgagatgggacttgatacaccggttgtggttgataaaacaattatttcacagtgggtgacagtagatgagaattatgtggtgacatttcacccggaacttatacaggaatgggtgacgcagtttgcacagcagtatgatactgcaggaaagaccagacaattcactacaccggatggaagagcaaccgaagtttccggtggaacttacggttgggagattaatgaaaaggcagagtatgagacacttctcgcgaatgttgaaagcggagaaacaataagtcgagagccggtttatgtggaaggaaagactgcggcatcgcatggtgcgcaggattggggctccacttatgcagaagtcgatctgacgaatcagaaaatgtggtatgtcaaagacggagaagttttaatgtcagcagatgtagtgaccggacttccgaaaggcggaagaagtactccggcaggagtttatacgattttggaacgaatgcagaataaagtactgcgcggtaatttaagaccggatggaacaagagagtatgaaactcttgtaaaatattggatgcgtgtaacgtattccggtgttggttttcatgatgcaacatggcagagcagttttggaggaaatgtatatacctacagaggttctcatggatgtatcaatatgagctattcggatgccgggaaattgtatgagttaatccaggttggagatccggtaattatgcactattaagaaaaataataagaaaaaatcaaaaaaatctgccaatcggcagatttttttgtatactaaagagtggctaaaaattgaaaaagaggtaaaaaaattgaaaaagaggtatgtaaacaatttaatacttctgataatcgcgcttatttggggcgcagcatttgttgcacaaagtgctgggatggactacatcggtccattcacatttaacagtgccagaagtatacttggtggaatcgtattgattccggtgatttatgtattggataagaagagaaaggaggagatatcacaaggaaaagaagttatacaaaataagaaaacacttatcatcggtggtatttgttgtggatttttccttatgctgggaagttccttgcaacagattgggatacaatatacaacggcgggaaaagcaggatttatcacggcattatatattctgattgttccaatcctggggctggccgttggcaaaaaggccggaattaaagtatggattggtgtggtacttgcagtgatcggaatgtattttctgtgtatgacatcaggattatccattgcaaaaggagatttttatattttactgggttctgttgctttttcattccatattcttgtgatcgatcatttttcaccaaaggcagacggagtgaagatgtcctgtattcagttttttgtttgtggaatcttatgtatgataccgacaattttatttgagcacccggaaatttattctatattgcaggcatggaagccaattgcttatgcaggaatcatgtcttgtggggtaggatatactttgcagattgttgcacaaaaaaatacagacccgacagttgcatctctgctgttaagtcttgagtctgtattttcagtacttgcaggctgggtgattcttggagaaaccttgtctccaagggaactttttggatgtgcccttgtatttgcggctgtgattcttgcgcagcttccggagagaaggcctaatctctcatgtaaagatttacaacgtgaagaatcccgtcctcatcattcgactttgtgataaagtcagcagattctttgacgaccggctgggcattccccattgctacaccaagaccggcatattcgatcatggacagatcattgaagccgtcgccgcagcagatcatggaatcggcagtgagaccgatactgttcagaagcttctgcagagagtgtgctttatcgatattctgaggcatgatctctaagaagaatggctcagaacggtagatgttgagcagtccgtggtattgtttctgcagcttcggcatcaggtcttccaggatggaaggttcacctgggataagtattttattgaccgggaaatcaagtgcggcagggaagtcctcaaccggacagatctccatgctgttgatggcggcttctttctcagtgtattcattacttttaataccggagaggattactttatccgtataagagataaggtccaatccaggatattcttttaccgcctcgtaaatcggacggatgacttcctgtgggataaccttattataaataattgcattgtcagaacagcgggtgattctcgcaccgttaaaggagagcatgaatccaccgtattcttttagatataattcctctgccagaggtgagacaccgttgatcgggcgaccgctggcgaggactactttttttccattctgttgaatttcaatcagagcgtcccttgtagggggcgttatttctttttttgaattggtcagtgtaccgtctagatcaagtacaatcacttggtatttcataataattaaaactccatttcgttatatagtgacagtaattaatgatgtgcttcattcagcagcttggtttttgtatcgtacagtttttgggaaagatccacatataccttatgtggattgaagagacgttttgtctcatcccaaagcgtctttttttcctgacgacagaattctgcaatctcctttacagatggggactcatacttacattctccatgctggaagattgggacaagcagttcacgcattgtgtaggttccacccggaagaagtgttttcttccatgttgcattcgggtcaaagagaagcagatcttcttcctctgtgttaaatgtttcatcagcgaagcagatgagatcagcgcgcagcataccggtttctttatcgtaaatacgataaatggttttatttcccggattagtgatcttctcaatattctcagaaatcttgatcttcggctggaattctccatctgcgttttgaatagcggccagtttataaacaccgccaaaagacgggcagtcttttgatgtaataaggtttgttccgacgccccaggaagaaattgcagcgccctgcatcttgagatcgtggatcagaaattcatccaggtcgttggaagcggcaatgacagcatcctggaatccggcgtcatccagcatcttacgcgcctttttagaaagataagcgagatcaccggagtcaaggcggataccgtagctcttcggtttgatgcctgcttcgcgcatctcggtaaaaacacggatcgcattcggaacaccggatttcaatgtgtcataagtatcgacaagcagtgtacatgcatcaggatacaatcttgcatattctttaaatgcagtatattcatctttgaaagtcatgatccaactgtgtgcatgcgttcccataaccggtacatcaaacatttcgccggcgagtacattggaagttccgacgcatccaccgatcacagcagctcttgctccgtacagtcccgcatccggtccctgggcgcggcgaagtccgaactccatgataccgtctccttgtgccgcataaacaacacgggaagctttcgtagcgatcagacactgatgattcagaattgtaagaattgctgtctcaacaagctgagcctccatgatcggagctacgactttcagaagcggttctcttgggaagatgacgcttccctccggaatcgcataaatgtctccgctaaaatgaaatccgctcagataatgaagaaaatcctcactgaacaatccgagccctcttaaataatcaacatcttcataagaaaaattcagatttttaatatagtcaatgacctgatccagtcctgccatgacggaatatccgcctttgttcggattgtcacggaagaaaacatcgaatacaacagtctgattttcctgtgtttcaaaatatccctgcatcatagtaagctcatacaggtctgtcaataaagtaagattttgtgcactcatactaatatcctctcttaaaaatactgcctcagacaggctgtaggcagaaagattgctctcacattgaagtaattatacataattcagaaaggtaaatcaattcatagaaagaatatgttaaaaaaatatcaaataaagaatcaaagaaattgatgagattcgattgacaacagcatagaaaataccttaaggtatagaaaacatattaaaaaatgggccgcgtaagccagcggcagaatggagaaaagatgagattaggagtaaaacaggtacttacggtagtaaagctggtagattttggagtatatcttggaagtgacgaggagcgtgttcttcttccaaagaaacaggttccggacggaatcgaactgggagatccgatcgaggtattcctctataaagattcttccgatcgtatgatcgcaacaacgaatgagccaaagatcactcttggacagctggctgtcctgacagtagcagatgtgggcagaatgggtgcttttcttgactggggacttgagaaggacctgttccttccatttaaggaacagacagagaaggtagagaagggcgaccgctgtctggtaagtctttatgtagataagagcgagagactttgtgcgacaatgaagatctatcatcttctgcagacagactctccttataaaaaggatgatattgtaaccggaacagtttatgaggtgaatcgtgatctgggagctttcgtggcagtagataatctgtattctgcattgattccgaagagagagatgtatggaagaatgtatccgggacaggagattgaagcacgtgtggcagcagtcaaagaggatggaaaactggatctgagtgtccgtggcaagattccggagcagatggacaaagatgcagaattgatcctggaatgtattgagacttgtgggggtaaacttccattcacagataaagcagatccggagcgcatcaaagcagagatgggaatgagtaaagctgcgttcaaacgtgcagttggaagactcttgaaacagaagaaaatcgtaatcaaagaggacggtatttatagtttgtaaaagcaatctgcaaacgaaccgttatgtgttagagaaagtgactatgacttgtaggaagtgttgtttcaaatagaaaaaagtgtgagattttatatgctgaaaatgagaaaaatagtgattcttcctacttgtaatatgctttaaatgcgttataataacattaggaatgagaaaatgataggtaatatcattcccagatgaatttaggaagtaaagttataattaaattgttaaaagaaaggggtatttagaatgaaagttcagaatattacagatgttgaaggattttttaaggtagtagattcttgtaaaggaagagtagagttagtaacaggtgagggagacagactgaacctgaagtctaaactttcccagtatgtatctatggctaacattttctctaacggagagattccggagctggaagttatcgcttacgagaaagaagatacagataagctgatccagtttatgatagatggtggaaataaataagatttaacattttaaaatttccataaagagtgtaaaatgaagggaagggattctgacctgtgtatcaagtcagagccttcccttttcttagttaaaatttgatcattgaggtgaactatgagttttgcacatttgcatgtccatacagaatttagtctgctggatggatcgaataagataaaagaatacgtgtccagggtcaaagaacttgggatgaacagtgcggcaattacagatcacggtgttatgtatggtgtgatcgatttctatcgggaagccaagaagcagggaatcaatccaatccttggatgtgaagtgtatgtggctccgaattctcgttttgatcgcgagatcacaggaggagatgacagatattatcatcttgtgcttctggcagaaaatgaggaaggatatgcgaatctgacgaagattgtttcgaagggatttgtggaaggttattactataaaccgcgagtggataaggaacttctgcgcaagtatcataaaggtatcattgctttaagtgcctgcctagcaggtgaggtggcaagattcctgacgaagggattatatgaagaggcgaagaagacagctttagagtatcaggaaattttcggcgaagggaatttcttcctggagttgcaggatcatggaataccagagcagggacttgtcaatcaacagctattcaaaatgtctgaagagacaggaattgagctggttgctacgaatgatattcattatacatatgcagaagatgcgaagccacatgatattctactttgtattcagaccggaaagaagctttcagatgagaatcgtatgcggtatgacggcgggcagtattatgtgaagtcagaagaagagatgctacgtctgttcccttatgcgaaacaggcgttggagaatacacagaagattgcggatcgatgtcatgtcgagattgaatttggtgtaacaaaacttccgaaatatgatgtgccggatggttatacttcctgggaatatctgcagaagctttgctatgaaggattggaaaagcgttacggtgatccttcggaagaattgaaagagcgtttggcttatgaattggaaacgattcatcagatggggtatgtagattatttcctgatcgtgtgggattttattaaatacgcaaaagatcacggaatctcagttgggccgggacgtggatccgctgcaggaagtatcgtgtcctattgccttgagatcacgacaatcgatccaatccgttatcagttgctgtttgagcgtttcctgaatccggaacgtgtatccatgcccgatatcgacgttgacttctgttatgagagacgtcaggaggttattgattacgttacaagaaaatatggaaaagactgtgtggctcagattgttacattcggtaccctggcagcacgaggtgtgatccgtgatgttggacgtgtaatggatctgccatatgcttatgtggattctatttccaaaatgattccgcaggagcttggaatcacaattgataaagctctgaaaatgaatccggatctgaaaaagttatatgatacggatgagacggtaacaaatctgatcgatatggcgaagcgtttggaaggactaccgagacattgttctatgcatgccgccggtgttgttatctgtcagaagccggttgatgagtatgtacctctttcgagggcagcagacggaacaatcacaacgcagtttattatgacaacacttgaggaacttggacttctgaaaatggacttcctgggccttcgtacattgactgtgatacagaatgcagtgctgcttgcaagaagaaagcagccggaactgaatatcaatcagatagattacaatgatcaaaaggtgctggattatatcggaaccggtaagacagatggtgtgttccagcttgagagtgctggaatgaaagggttcatgaaggaactgaagccgcataacctggaagatgttattgccggaatttcgctgtatcgtcctggtccgatggatttcattcctcagtatatccgaggaaagaatgacagttcttctatcacatatgattgcccacaactggagccgatccttgcccctacttatggatgtatcgtctatcaggagcaggttatgcagattgtacgagatcttgcaggatactcacttggacgaagcgaccttctgcgtcgtgcgatgtcaaagaaaaaggcggcagtcatggagaaagaacgtaagatctttatttatggcgatgaggagacaggcgtaccaggatgtataaagaatggaattgatgaacagactgcaaataagatttatgatgaaatgatcgattttgcaaaatatgcgttcaataagtctcatgcggctgcatatgcagtggtttcttatcagactgcgtggctgaaatattatttcccggtagaatatatggcagcgcttatgacatcagtcattgataatccgtctaaggtatctgagtatatttatacatgtcgccagatgaatattaagatcctgccgccggatattaataaaggtgaagcaaacttctctgtagatggcggggatatccgttatggacttgctgcaatcaagagtatcggaaggccggtgatcaaagcaatcgtggaagacagagaagagcttgggttgttccagaacctggaagatttcattacccgtctttcagcaaagaacatattaaataaacgtacgatagaaaatctgatcaaggcgggggcattggatacgcttggcggaacaagaaaacagttcatgagtatctatgtacagatcgtagatcatgtaactcaagaaaaaaagaactctatggttggacagatgacattgtttgatctggtgagtgaagatcagaaagaagaatttcagatcaggatgcctgatgtgggagaatactccaaagaaacacttctcgcatttgaaaaagaagtacttggaatctatgtcagcggacatccgcttgaggcgtatgaggagaagtggaagaaatccatttctgcgacaacggcggactttcagctggatgaagagaccggtcatacaaaagtgcatgatggggcgaaagaaattattggtggaatgatcacagagaagaccataaagcacacaaagacgaatcagatgatggcatttatcacggtagaagatcttttgggaacggtagaggttgttgtgttcccgcgagattatgagaagaacagagattatctggaagtagatagcaaggtatttgttcgcggaagagtttcggaagaagatgataagccgagtaagatgatctgtgagaaaattattccgtttgaacggacgaaaaaggaattgtggattcagtttcctgataaggcgacatttctggatgaggaacagattgtctatggatatctggcagattcagacggagatgatgaagttatgatctactgtgcgaaggaacgtgcggtgaaaaaactgccgaaaaacaggaatatcggtataaatgaacagattttaagcagattgatgaatcatttcggcgagaagagagtaaaagtagtggaaaaacctattgaaaacatattctaaataaggtagaatattggcggagttgataaaaaattgacaatgattggttttggcagtaatcagacatttcagagaaagggtggactaaaacatggcagaaaataaaacagtcgacaaagaaaaatatcttgatgaaatcgaagacagcatccgtacaatcggtgttctgacaagtggaggagatgctccgggaatgaacgcagcaatccgtgcggtagtaagacgtgcacttgcaaaaggacttaaggttcgcggaatccgcagaggttatcatggacttctgaaggaagagatcattgatatgtcagcacgtgacgtgtctgatatcattgagcgtggtggtacagttctccagacagctcgttgtaagacaatgcgtacagaagaaggtcagcagaaggcagctgcgatctgtaagaagtacggaatcgacggactggtagtaatcggtggagacggatcttttgcaggagctcagaagctggcaaatctgggagtaaatacaattggtattccaggaacaatcgaccttgatattgcatgtacagattacacaatcggatttgatacagctgttaacacagcaatggaagcaatcgataaggttcgtgatacatctacatctcatgaaagatgcagtgtgatcgaggttatgggacgtgatgcaggatatcttgcactgtggtgtggtattgctaacggagccgagaaaattctcatgccagaggaaaaggactatgatgagaaagcactgatcaaagatattcttgagaataagaagcgtggtaagaagaactacatcatcatcaatgcagagggtgttggagattctatcaatatggcaaagagaatcgaagatgctacaggaattgagacaagagcaacaattcttggacacatgcagcgtggtggaagcccgacatgtaaggacagagtatatgcttctacaatgggagctatggcagtcgaccttctttgccagggaaagacaaaccgtgttgtaggatacaagaacggacagtttattgattttgacattgaagaagcacttgctatgaagaagacaattccggcatatcagtacgatgtagcgaagactcttgctctgtaaaaatgtgaaatagcattgcaaatatcactttgagttattataatagaatagcaatggttaccagatgactggtaatgaaatataacattcagccatgcagcctttgtaagaaggttacatggctgaattgtgtatctgcgataagataaaaataactgataaggatagattaaggggagaactttgacggacatgaagaataaaaagatggcaccgatcggggtgtttgattcaggagtcggaggactgactgtagcgagagagatatcaagacaattgccgtatgagaacattgtttattttggggatacggcgcgtgttccatacggtagtaaatcacaaaacacgatcattcgtttttcagaacagattatccgtttcctgaggacgaaacaggtgaaagcaattgtgatcgcatgtaatacggcgagtgcgcttgcattggatgcagtgaaggatgagtttgaccttccgatcattggagtagtcattccgggagcgagagcagcggtagaagctacaacgaatggaaaagtcggtgtggtaggtactgaagcaacggttcagagtggaatgtatacgaaagtgattcagggaatgaatcctaagattgaagtgatcgagaaagcctgtcctcttttcgtaccgttagtggaagagggattcaaagaacatattgtgacaagagagattattgagtattatctcgaatccatgcgcaatacagatattgatgcgatgatccttggatgtacgcattatccgcttctcagatctaagatcagagaatatatgggggataagattcagattgtgaatcctgcatatgagacagcgatggatctgaaacgtctgttggaagaggaagagatggcgaatgatgagacgacagaacatcatagtgagtattccttctatgtcagcgatgcggctgagaagttcaggaagtttgcgaatacagtgatgccatttgatgttccgacaacgaatgtagtaaatattgaagagtattaattagtaattctgaatcaggaaagttatttcgtgcttgtacgttggttgcggaaagactgacggaacgaaattttcctgattcttttctatggagaattcatttatgacaaaagatgtattggtaagtatttccggaatgcatgaggagattgtggcggtcactccggaggtagaagaagatgagaacgaagcaatcgaagttgtgacaccagcaacgtattatttgaagaacggaaaacattatattgtctacgaggaagttgtagaaggaacttctggagtgatcaagaacagaattaagattaacggagatgaatgtgtagagatcgtgaaaagcggtctttcaaactctcatatgatctttgagaaaaataaaaagaatcagacattttataagacgccttatggacagatgctgatcggagtgaatacgagacatcttcaggttgattttgaagaagataagatagcggtccagattgattatgaactggacgtaaatcatgaaccgatggcagactgtaagatacggatgaatattgtttccaaggacagtggaaagttttcagtgcttagttaagatacaagaacgccgaggcatttttggataagcaggcggaaaaatgaaaaagataagaatgagaggataagatgatggtaataacactgatcgagaaagtatattcgtttttatggggcgatctgtttcagataccgcttccaggcggcggaagtgtgggaatatcacttctgattattctgttgattccaacaggaatttatttcacaatccgtacaagatttcttccaatccgtctttttccggagatggtaagatcgttgaatagtaaaaaagggaaagaggatgggttgtctaattttcagacactgattgtatcaacagcaacccgtgtgggaatggggaatctggtaggtgttgttgcagccatctcagccggcggggctggagcagtgttctggatgtgggtcacggcactgatcggttcttccacagcatttgttgaggcaacacttgcacagcttcataaagaaaaagatccgttgtatggaggatatcgcggaggtccggcatattatatccatcactacatggaagaacatcaaggaaagaaaaagagatattcagtgatcgcggtattgtttgcaatttcaggattaatctgttggtgtggtattagccaggtgatcagtaattcagtgacgtcttcgtttgaaaatgcattttctatcccaccgatttatacaactgtgattttggtggttctggcagcagtgatcgtgcttcgaaagaatgcaacagtaaaggttctggatgttgttgttccgattatggcagtgtgttatttcctgatcacagtatttttgatccttacgaatctgtccagcataccgggtgtgttctcacgtatttttgaggaagcatttggagtccgtcaggtggcagcaggtggttttggagctgttttgatgaatggagtgaagagaggattgttctcaaatgaagctggttcaggatctgctccatgtgcagcggccgcggcagagtgtgatctcccggtaaaggcaggacttgttcaggcattgggcgtatttatcgacacaattgtaatctgcagctgtacagcgatgatcatgttgcttgttccacaggatcagattgagggacttgcaggaatggaactgcttcagacagcgatgagatatcatcttggagaagcaggggtgatttttatcgcagtgatgctgttcctgttcagtttttctacatttcttggaattctgttttatgcaagaagtaatgtagcttatctgtttggagacaactgggcatcccagacagcatataaagtgctcgcacttgtgatgttattcatcggaggaatcgcagcgtacacatttgtatgggatctgggcgatgtcgggatcgggctgatgacggtattcaatacagtgatcctgtatctgatgggtggccaggcgttggatgagctgaaaaaatatgaagcagtgagaaaagaacaaaagaaaaagaattaaaaaaataagttcagtcgaattgtttgactgaacttattttaatggtgtttttatttttctttctttgagaaaaatctttttttcttctttttctctggaatatcaagaccaccgcggacactcttaatgcctgtgatatagataccacttacaacgactttcgcttctttcttcaccggaagaacttcgaaaacctttacatcacacatcagagtcataacctttggtccaacctttgcttttacaaccggtactttagaacgtcttaaatactttggtgtattctcaagaacaacggccgggagtcctgcatcttttagcttcatcttctttttatcaataatgagcatgctgacggtctgcgcaactgcgtccatctgctgctgctgttcagcctgcttcttctgcgctttctttccgaagaaatagagtgctacgcaaaccccgatgagaactacgaggacgatgagcatgattatcataggtgtactcacgataaaaccctcctatatactattttccgcttaattcgcatttaatattgtaacattctttattacaaagtgcaagcagacaggggacaattttacaatttggggttacttttaagacgtaaaccgagtatactatgtattatggtggtttattattgtttgcagaaagatagcagcgctggcgttgctgttcactcccgtgtcaatcactcggctgattgacacggaggatgcgtgttttgacttgaatgcatctcgccccatcgccaaaggcgatttaaaatggcgagatgcgttgctggtcgcacatcgtgtgaacagtaacgcgctgtccgaagaatgtgatggagtatagtgagcaataatattttcacgttgattaagagaaagggagagttgaatggcagagacaatatggaacacagtggtgatggtttttcattttattatgaagaatatcgttatcattaatattcttttatctctgattattgtattttttgaaagaagatcaccgcaggcagtatggacctggctgcttttgctttattttattccgattgtcggatttattctatatctgatcatagggcaggattatcacaagaataagatgtttaaggcaaaggagattgaaggtgagctgaaatacgctgtgcgaaggcaggaggaaaccatttatcacaggcagctgaagatgacgagtccggcacttaaccggttccgggatcttgtgctttataatctggaggccggacaggcagttctgacagataataatgatatccgtatttatacagatggtaaagagaagtttcatgcactgatcgaggaaatgaaacgtgcgaagaaatatatccatgtacagtattatattatcaggaatgatgaagtgtggcaggatatagagaaggtattgatcgagaaagcacatgaaggtgtagaagtcagagttttgtttgacagtatgggatgtcgtaccatgcacaaaagagattgggacaggctgaaatgcgaaggaattcgggtcgcagaattcttcccggcgattctgggacagcttcagatgcgtgtgaattatcgaaatcacagaaagattgtcgtgattgatggaaaggttggctttgttggtggtttcaatgtaggcagggaatatattggaaaagacgaaaagtttggttattggagagatacacatttgtgtattgaaggtgcagcggtcacatctcttgcagtgaggtttgtcctggattggaattatgcagctcatgagaacttgtttttggaagatcatttgtttgagattccgcagtatgacaggcatggatttgatccggtacagattatctcaagtggaccggattcacagacgaagacaatccatgacaattatcttcatctgatccacagtgcaagaaatcatgtttatatacagacaccgtatttcataccggatgcgtccattctggatgcgttgaagattgcaagcagatccggggtagatgtcagaattatgatcccatgcaaaccagatcatccattcgtttactgggcaacgtattcttatattggggagatggttgcagcaggcgcaaaatgttatgtctataataatggattccttcacgcaaagacattatcaatagatggcatggttgcctgtgtaggtacagcgaatatggacatccgaagttttggcttgaattttgaagtgaatgcaacaatctatagtgagcgtacagtgcagaggttggaaagagcttttgagaatgatatgacaaagagtacgcaagtgacacgaaagatatatgaggagaggaatttactgatccggttcaaggaacagttttccagattactgtcaccacttttatagtggataagacaaaaaaataaaaaagaaattataaaagaggagaaacaggaaaatgaaaaaaagagtgattgcggttcttacagcggttctgatgacagcatctttagcaggatgcggaagtggtaagttgtctaatgattatgtgacagtgaacaaatataaaggacttgaagtaacagaggttgccaaaaacgaggtgtccgatgattctgtagagcaggagatacagtccagactggaagctgctgcgccagaacaggatgtaacagaccgcgcggcacagagcggagactgggtaaatattgactatacaggaactctggatggagttgcatttgacggtggcacagctacaggatatgatctggaacttggatcaggatcgtttatcggagcttcaggcgattatcagggatttgaagaccagattgtgggacataataccggcgaagagtttgatatcactgtacagtttcctgagaattatcagagttctgatcttgcaggaaaaccggcaaatttccacattgtattgaataagatttatcaaaaagtaacaccggagcttacagacgagtgggttgcaaataatagtgaaagcagcaagacggttgatgaatacaaggaagaggtaaaaaattctcttcaggagcagcaggacgattcaggtaattcacagttgaaacaagaagtacagactgctttactggatcagatagaggtaaataaatatcctgacggtgcagtagatgagcaggtgaaacaggcaaatgattactatacacagatcgcacagatgtacggagtagagctgagtgattttattacaacttatctgaagatgacagaagatcaatttaacaaaaaaattgaagactcagcaaagcaggctgttcagcttgaagaagctgtaaaactgatcgccaagaaagagaaactggaaccgtctgataaggaatataaaaaaggaatgcaggagtatgcggacaaagccggagcagatctggatacctacaaagagcaggtaggagaagatgttctgaaagatgcaatccttcgtgataaagtactggattatctggtagataattgcgtacaggtagagcagtccgataaaaattaaaggggaataaaggaggaacaaaaatcatgattaaaatggagaatgatgtgctcagcgtagagattgcagagcatggtgcggagctgacaaaactgtataacaagaaaacaggtacagatcttctctgggatgcagaacccaaattttggaaacgtcattcaccggtgttatttccaaatgtgggaaaaacctataagaacacagtgaagatcaacggcacacactatccgacatcacagcatggatttgcaagagacagtgagttcaaatgtattcatgcaggcaaagaaacatcaatctttcttctgacatcaacagaagagatgaaggaagtttatccatttgattttgaacttttcattacttatacactggaaaaaaatgtactccatgtaaaatgggaagtaaagaacccgtctgatgagacaatttatttcacaatcggagcgcatccggccttccgctttgcaaagaacgaggaaggaaagacagattatattctgaagttccctggaaaagatgaattgaagtattgtctgatcaatatgaaagaaatggctcctgatccggaggaactgcatgagatgaaactaaatgaagagacatatccgttgacagaagaactttttgaaaatgatgcgttgatctttgataatacgcagattgaagaagcatggatctgtcataaagacggaactccgtatgtgggagttaagtcagaaggatttccaagctacggaatctggtctgtaaaagacgcaccgtttgtttgcctggaaccatggatgggaagatgcgataatattggatttgataaagaaatctctgagaagcctggaattaataaggtagagagcggagcggtttttgaaaaagaatatcagatcgttgttgcaataaaatgatataagattcaggcatactgagaatagtatcctgtggaaaggaaaagcccccgttaaccggaggcttttttctctttcattctcttgatcactttcagacgcgtgaactcttcacgctctttttcttccagtgcattggtgatcgaatagaccagatttgaatacattggaattgtaatgttctggagagcatttgctcgtttctgcgtcttcttgatattacttgcgagacggtaagcggcgttttcaaccatggagagcttgatcgtaaggtcttttaccttgcggaaggcctcacgggcaatatcgatcgattcctttgtggtactgaaggcataggtcggctgaccggcgtccggtacatatttcacatgaggaatctcggttcccatgatacttcgtgtctggatcgtgatagaattttcaatcggtacagtgtaggcgagctgttctaccatgctgataccgttttcgatattagcacgctgcagacattgatacgcataagtaaatgttgaatcaatctcttcctgtatggtgcgtgcttcttcaatcagatccatcagttcacgaatcaggatgttacgcttcttatccatcagatcataaccctgccgggcaagtgcaagagagttcttggccagcatcagattaccctttgttggaaatgtacgtggatccatgaagctccctcctttccctagtcttctacagcaggtttatagtatttatcaagaatcttcgtatcaacacggtcgagttcttctctagggagttttcctaaaagtttccatcccagatccaaagtctcttccatcgtacgattctcattaacaccctgtccgatgtagtgctgttcaaagtcgattccgaattccagatatttcttatccagtggtgaaagttcatcttcaccgataacagaagccagatttcttgcatctccaacttttgcataagcggagaataactgattggcaagatcttgatgatcttcacgtgtaaaaccttctccgataccgtccttcatcagacgggaaagggatggcaggatattgatcggaggatagattgactgtccatggagcgggcggtcaagtacaatttgtccctcggtgatatatcccgtcaggtcaggaattggatgcgtgatatcgtcgtttggcatagtcaagatcggaagctgtgttacagatccgtttacgccttgtacaataccggcacgttcgtagatggttgccagttcactatacagatatcccgggaatcctttacggctaggaatttctccttttgaggaagagacctcacgcatggcttctgcgaaagaagtcatatcggtaaggataacgaggatatgcatattttgttcaaatgccagatactccgcagctgtcagtgcaacctttggtgtgatcagacgttctacaaccgggtcatttgccagattcaaaaacattgctacatgatcggcaacaccgctttcttcaaatgtgttacggaagaaatcagcaacgtcatgtttgacacccatagcagcgaatacgattgcaaatttttcatcagaatcgcttccaagagaagcctgttttacaatctgtgcagcaagctgatcgtgcggaagtccatttccggagaaaatcggaagcttctgtccacgaatcagagttgtcagtccgtcgatcgcggaaattccggtgcgaatatagtttcttgggtattctctgcggaccgggttgagcggaagtccgttcacatctctttttaaagtggagacaagcggcccgaggtcatcgatcggctgtccgataccgttgaaggtacggccaaggatatccggggagagtgcaatctccatcgggtgtccggtgagtttcgtatgtgtatttttcagggacatattttcagaaccttcgaagacctggattactgccttgtcttcgtaaatctctacaatacgtcctattttgcgttctgtgccgtctacgacaaattctacgatctcatcgtaaaaggcgtcctgtacgccctctaacacgatcagagggccgttgatactgcttaagccaagatattcaattgacatgatagtggtccctccttatgcatttttctcaagtacgtgctgatagaaagcgtcaatatctctgtgatactgtgcaaacatttccgggcggttatttggaacatcatatttgatcgcaatgacacgatcgaaaatattctcagattttaatacggacatcggatgtcccattgtgacaagggtacgtgcctgcttgtaaaggtacaggatcgtatccatcatcaagaactgtttttccatagaaacgcaggtgtcatccgggtggaatgcattttgctgcaggaaaccaagacgaatcacacgggcaatctcaaggacaagtttctgatcatccgggagtacatcgcttccaatcagttttacgatctcaagaagactgctttcctgattcaacagtgccatcagacggttgcggtaatcaacgaatttcggagatacattgtcctgataccagtgacttaagtcgttcagatactcactgtaactggtcagccagtggatggccgggaaatgtcttgcataggcaaggctcttatccagtccccagaagcagcggacgaaacgcttggtgttctgtgtgaccggttcggagaagtcaccaccttgtggggagacagcaccgatgatcgtaacagaaccgtctgttccgttcaggttatgcatcattccggcgcgctcgtagaacgcagacagacgagatgcgaggtaagctgggaacccttcctcggcaggcatctcttccagacgtccggaaagctctcgaagagcctcagcccaacgggaagtggagtcggccatgattgctacatcgtagcccatgtcacggtaatattctgccagagtgagtccggtgtaaatgctggcttcacgggcagcaacaggcatgttggaagtattggcgatcagtgtagtacggtccatcagaggtttgccggtacgaggatcggtcagttcactgaactcttccaaaacctgtgtcatctcatttccacgctcaccgcatccgatatagatgatgatatctgcatcggcccatttggcgatctgatgctgtgtcatggtctttccggttccgaatccgcctgggatggcagcggtaccgccctttgcaatcgggaacatggtatcgatgatacgttgtccggtaacaagcggaacagatgccgggaaacggtgatgagtcggtcgcggagtacggatcggccaatgctgagtcattgtcagttctttctcctgtccgttaggaagttccagacgaaccagaggttcgtcaattgtgtattcaccgtctgcaacagtcacaagaacagttccctctacttcaggaggaaccatacatttatgagtgatcgcatgtgtttcaggaacttctgcgataatatcacctgcatggagataatctccctgctttacagtgatgtgtgttttccatttctttgtacggtctagagaatcgacactgacaccgcgtgtgataaatgcgccgccggaggattctgcgatatcttccagtggacgttcgataccatcaaaaatgttgttcaggataccgggtgcaagtgttacggataccggacttccgctggcaataacttcttcgcccgggcgaagccccgttgtttcctcataaacctgaacggttgtcatatctttatccagtgcaatgacttctccgactaatttctgttcgccgacatagaccatctcggacatacggaatcctgtgttgcctttcagataaatgacgggaccattgatgccgtaaattttcgctgtcttaagcaatgccgtcacctcctaaaaatacaaatttgtcatactgttctttcagctgtgtgctgaaggaattatcgatcaaaatgttgcgggaacggatgacagcacggacaccgccccggaaatcttcggcgctgatcgtcagatgaactcttgtagcaccttccagatcagaacgttttttttcatcagttgggttaatatagatcgtaagctcatcatttccggcaaaagccaccgctttgcggatgcatttgataagaaaatcatcataagcttccgtcttcataaattcatcgattaatgcgtctgcttcctcgaagatcttgtctttcaattcttgctgaaccttgctttgacgacgtttgatctccagctgggacttggcgagcgcctgattcagtgagagcttcgcattggcagcttccgccttgatgcgagtttctgactgtcttgtggcttctgccttatgatcttcgaaaaccttctccagggcagcctgatgggtgtcaatgatgacatttccctctaagcgggcctgctccatggatgtggtttgcaggtgtgcgattttttcttccagagtcaagaggaatccctcctttagttcgtaatataattgcgtttataatttcagtccgatcgcctcagtgatatatgaggtgataaagtctttctgacgaccggttccgtggcggtcaggaatttcgatcaataacggcatctttcgctccagtcggaaagtgtcgataatgtcaggaaattcctgaccgaacttctcagtcagaagaacaatgccgacagtcggatcggaaagcactttttccaaagcctgtttcagctcatcccgttcgtggacgacaactccgtctacaccggcaagacgcattccggtgtaagtgtcgacattgtcactgatcagatacattttcataggcggctcctttctgttgaaaatcagaaattagagatttcctaagatcatgaaagagatgatcagtccgtacagacaaacaccttcggcaagtcctacgaagatcaaggatttaccaagaacgctggaatcctcgctgattgctccaagtgctgcgctggctgcacttgcaacagcgataccaccgccgatacaggaaagacctgtaacaagtgcggctgcaagatatcccattcctgttgcgattgtagcaccggaagatgcggcagcttcagcagcctgtacatttgccggacctgcaagcatcatgatagatgcaatggcaaatgcgccgaagaagaaaaatgcgttgacaccgattgtacgtttgtagcgttttttgttcttttcaccgatcagataatatccgaatgggatgatgatacttaaaacaagtgctgcgataaagatgatttttgttgctaaactcatagtggaatcctcctgatttctatacattttatggctgtcatagatttaagccagacagttatttcattttcttttttgtatatgggtcgaatgcacgtccgcttcctttgtagaaacggctgaacatctcataatattccagacgaagtacctgaatacctacgatcagtccttcgaatccgcatacgaacaggttgccaaagatcactccgaaccagttcggatttccgctttcagcgccggccagctgaagtactacttccatgatagcggcatggctgacggcaaatgcaccgatacggataaaggaaatagtgtttgagaaataactgagcaatgtctcaaacatctcgaaaaagccttgtacgatgtacattccagggcctgtttccatcttgtcggcacgtttctcaatcatgcgggtcagaggctctttcaggaaaatgagaagcagcgggacaccaaacatgatacccatgacaataccacccggaagcggattgcctgtcataaagagaacgatggttactacaacggcaatgtagaaaataagtcctgccacaccgtttggatcaaaccaggtactttcgatatctttgcttcttgcggcattgataatatgtaggatcatcgctacgatgatcaggaacataccaaatgcgacagcaatgataaacactgtgtttagtttgccgaggaacggcagtgtagtcatatggtcgatcggtcgtatccacaatggttcaatgatgtcttcaaatccgaaaatacttccgaacataaatccgaagattgtggaaaatacaccggcagttgcgataattccggcaagtggagctttcttaaagtgatagatcaaggctccaccgattaaaagcaaaagtccctgtccgacatctccgaacataactccgaaaataaaagagtatgtgattgctacgaaaatggttggatccatctcattgtgagccggaagaccatacatctgaatgtacatctcaaatggtttgaatagcttcggattttccagctttgtcggcggttctccgaagtatgcatcatgatcgtcttcgacaacgacaaagactttgtcatcatctttgatttcttccaaaaacttttctacatcatcttctgccatccatccgcagaggatataagaatcatcctggctgtctttcatccgggcagccatcttacggatgtcaaagttcttggagagttcctccagacggtttttcgctgcaataagctgtggtgcccggtcagaaagcatctcaccggcttctttatccagatcctggatctccagattgatccgagcaatatcccgttccagtgactggtaggcaaaagctggagttccttcgaattcgtcttttagttcgatgcgttcaaaatgaagagaacggaacacagcatctactttttgagcctctcccggagaaacgaagtaagcgccgtatacgaagctttcatcgcgttcaccttcaacgaagattgcactcaaatcatccatcagatatttattcatcttgtgataagattccagcgcgatccgtccgaaacgatatgtaatatatcgatatccaaggaccttgtgcaggtcgcagtcgagcggacggaatggggagagcagttgctgtttggcacggagctcttcaatcttagctttctttttctctttctttgcctgcagaccttcgtaatcttcacaggctttgcgaacaacctcaaacatgtcgtcgagacctaaagattcatccggtgtaacatcatctacattcggaagatagccgacgaactgggttgcctgggcaagtacatcccggtacggattaagttctacgaacgggcgaagattatcgactgtcttaagctcggacagtgcggactccagctgtatctcataacgtgagagatacaagtctgtgacacggtcgatatcatcccgcggaccggaaatgttgataaatttcattttaacaatcattgggttctacctccaacgtacgctaacgtctcgcccggtgtcagtccgtaacggatgcattccagagcggtagtcagctttttgatttcttcttcttttaagaagaggtaagtgttgacagcggcgatggagtaaggattccgtcttctgtcaatggtgtacagatgatggagacattctgaatacatctgctccatggtaagctgctcagtggattcatagcggcgggcataaggagtctgattgcagagtgtctgcagttcttccaatgtcgttgcctcgaccattcctttgatcaggtcggtagacagacgatagtggattggaagaatcagctgataaatgtcagcaggtttcatattaaaatatttcttggctctgtagatccactgcatattgagcagatcaatctgagtgccgcaatcccgctggtataattccttgtcttcctttttcagaacctttttccgtgctttccaaagagttgtaaaataataaagatttaatgccagatcgtagtcataaagagtgaccgaaggggaatcctttaatttctttaaaggttcataatattctgtctcctttaatgtctcgatcagttcatctgtagtgcgtgaggtgatcagtttctcgatcgatatctgcgaatatcgatcaaagaaaggacgtttgtaatcaagatcaaaaggtttctgataatggttgatcacaatcctcaaacaataattgatcagctcaacttcataagatttcaggcgaagcttcataagcttacgctgtttctgtccacaaaagcggtaaagctttgcgtagtcgcggtaaagtgaacgagtcagaatcttctcaatacttcctctgtgaagctgttcgggggccagttcttctaaaatatctgcgtaagcagtttctttcttcagatattcaactacctcgggaacattatgtagagaagcaatttcctcaaactgtgccggggtaaggagtttggcttccattgcccgggttttcgttacaataccactgtattccagtagatttcccataggctacacctcagtgatccgtcggagaatctcatgagcataatcagaatgcttttcatcgtattccttctgcagggcattaagttcatcctgactctcctgactttgcccggataagatccgtgaggtctccgcttccagtttgtcacgaatttcctgaatctgccgctgcgtatcggcttcaagctctttgtcgaaatccatccgctttttgtcaaatttttcatctaatgcggacttttcggtttctgcatgttgcacgattgcagatgcggcagattcaatctctgtcaatttgtttataatagagtccataaccagcctcctttttgttagaaattcataatatcttttataatacaccttttggagaaaattacaagcaatctgaaaagataatttatgttaaatatccagaggtattggagatagagactgtgagtctgagaatgtcattagtattcttcaaaatggctttcttgtgtggacagtaattagttgtgagatgagaaaaatcatgttatgataagacctgaaataatccgcagatatcaaagaaggttttaccttatatatagaaagtacgcagtaatgctgtggtgaagaacaggagaaaaatagcagatgagattaagaaatataccaagagcagatggcgtgatcgatgcacatcgtgctgtgatcaagaaaccagaggagcagagaggacagtgggctcaggtctttggaaatgagaaaccaattcagattgaaatcggaatgggaaagggccagtttattttgaatatggctaaggctcacccggagatcaattttattggaattgaacgttattccagcgtactgcttcgtgcacttgaaaaatatgatacagaggaatttgaaaatcttgagaatatccgttttatctgcatggatgcaagagagattgaagcagtgtttgcaccggcagaggtggataagatcttcttgaacttctcagatccgtggccaaaggctagacatgcgaaacgtagattaacatcaacagaattccttgcaagatatgagaaggttcttgtggaaaatggaagagtagaatttaagacagataatactgaacttttcaacttttctctggagcaggtgaaagaagctggatgggaactgcttgcttatacttacgacctacatcatcaggaagagatgaataaggggaatattatgacagaatatgagcagaaattttcagagaagggaaatccaatcaataagctgatcgcacagagaaaataagcatcatatattatatagaaagagcagaattcataggagaacaggatgagacgggggaaatgttggaaagctggggcccgtgagttgtgttattgtcatcagagactgaatcgaaggattgtctgcatttgcagatccttcgaggaggtatatcgaattctgaataggggatattgcaacaaagacaagggaaagaagaaacgttgctgatatcgtctgaattgtatatgaaattaataattttgaaaaaaatgaaaaaatttgaaaaaaggggttgcattctggcaacaactgatatataatactatttgtgttgaggaacacgagacacaaaaacaaaagaatgcgcgattagctcagttggtagagcacctgactcttaatcagggtgtccagggttcgaacccctgatcgcgcactaacaatcactgtttttacagacataggagctgtggggacggtgatttttttgtgcgcaaatatgcggtttctgaccattgaaccagaaatcgctatgaattgtaaagacgaagtgacttgccgcgaaatctgtcgcgaactggtcgcagattggtcgcgaggaaataaatagtcccaaaaagttctgaaaaagataaaaagagtaattgacctgaattattcatggcacagttattagttcagatattgttccatgaataattcaggttaaagaaatattatatacggttgacttttttctgttaaattgattatactatagcataatttacttaaaggaatttaaaaagggggcgtagaatgatggcaaagcaaaagacctatatcgcaatcgacctcaaatcattctatgcttctgtggaatgtaaagagcgaaatcgtgatcctttaacaacaaatcttgtggtggctgataaaagcaggacggagaaaacaatatgtcttgcggtatctccgtcattaaaaagctatgggatacccggcagaccgcgtttgtttgaagtcgtgcaaaaggtaaaagaagttaataacagccgcaggtggaaagcaccgaatcgatcatttactggttcatccgatgacagtacagaattaaatacgaatccggcgttagagattgattatatcgttgcaccacctcgtatggcatattacctggagtatagcacaaaaatttacagtgtatatctgaaatatattgctccggaagatattttcccttactcgattgatgaagtattcatagatgcaacagattatctgaacacctatcagatgactgcaagggaacttgccatgacgatgatacaggatgttttgaaaacaacaggaattacagcaacagccggaatcggcacgaatatgtatttgtgtaagattgcgatggatattgtggcaaagcatgttgagccagatgagaatggtgtgcggattgccgaactggatgaaatgtcataccgcagacaattatggagtcacagaccgattacagacttttggagagtaggcaaaggttatgcaaagaagctggaagaacacggactttttacgatgggagatattgcaaggtgttctattggaaaatcaaatgaactgtataacgaagaacttctttataagctgtttggaatcaatgcagaattgttgatagatcatgcctggggatacgagccttgtactttggagcatgtcaaggcgtacaagccggaaactaacagtgtaagctccggacaagtacttcactgcccgtatgattttgataaggcgaagctggctgtaaaagagatgaccgatcttatggttttggatctagttgataagggacttgttaccgatcaggttgtattgactgtaggttatgatatagaaaatctgacagacccaaataggagcgggaaatataatggtgatgttacgattgacagatatggaagaaaagttccgaaacatgcacatggaacaacgaacttgaaaatgcagacatcgtcaacaatactcataacagatgctgtgattgagctgtatgacagaatcgtggataaaaatctgcttatcagaagaattaatattacagcgaatcggctagtagacgagagcatagcaaagaaagaagaaaagtatgagcagcttgacctttttacggattataaggcaaaagaacaggagcaagctgaagaagacgcagttttagaacgtgaaagacgtatgcaacagacaatgcttacaataaaaaagaaattcgggaagaatgctatcctgaagggaatgaaccttcaagagggagcaacagcaaaagaccgtaacgaacagataggtggacacaaggcgtagaaagaaaatacggacacctatgccactgtaaatggaggaagattatggagaaccaagacaatcacagctatgatgatattataaatctgccgaatccaacttcaacaaaacatcctcgtatgcccctttctgacagggcagcacagttttcaccttttgcagcacttaccggacacgaagcagccattaaggaaactgcaagacgaacagatgaaaaattgatgctgagtgatgaagtcatagcagaattgaatgagaagttaaaactgattgctgaaaccattggtacacaacaagtggtcagaatcacatattttgtaccggataataaaaaagctgggggagcatatatttctcacgctagttatgtgaaaaggattgataaatatgaacatacagttgttatggaagataagacagttatcccaattgaacagataagtgatatagagggagaaatgtttggagatatgttttagtaacgcgaggagaagatgaatgaaaaccttgaatgattacatggcaatgtcctaccgtatggaaattgtagaagacaaagaagagggcggatttgtagttttttatccagatttgccaggctgtattacttgtggcgaaacaatagaaagtgcagtagaaaatgcacaggatgcaaaaaaggcgtggcttgaagctgcgttggaagaggggatagaaattcatgagccagttagcttgggaggagtgtgatgtacatatttcaagatattaaaatttgcgaacaacttcctaaacgcttaccgaaaggaaggactttgacataacattaaaaagcaccttgtaggtgctttttcgtacgtgggaagattactttattgttgacaaagccgaacggcttattttatatttaaatcacaggaataaagccgaacggcttaaaaaatcaaattgaaaacaaaataaagccgaacggctaattttatggagacaatatgaaaattatagattcgataacattaggagcaactataagggcaagaagaaaagaattaggttatacgcagagtgatttggcagaatttactggattcagtatcagttttatttctgacttagaaagagggaagaagacggcagagattggaaaagctttacagttaattcaactgttaggaatggatataaaaatagaaaagaggggatcagatgagtagaatattatctgtttatattgagaaaaacggaaaacaggaatatgtaggtaagattgttggggattcttcagtagatgcttgtttttcttatgatgatagttacatagaaaagaatggaaaaccaatttctattagcttacctttagaagagaaagcctttgatgaaaaaaggacaagatatttttttgaaggtcttttgccggaagggttcacaagaaaatgtgttgcagattggatgcaaaaagatgtgaatgattatctttcaattttggctggacttggcaatgagtgtcttggtgcaattcagattcttgatgaaaatagtgagaaaatagtaccggattatcgaaaactaactgaacgtgaggttgagatactggcaaaagaaggagcgtcggaaagtgcagagattgtgacaaaatcgcatttgtctttaactggagcatcgggaaaagtgggtttgtattatgataaggctgattctcaatggtatcttcctttaggatctatgccgagtacacatattgtgaaacaaagtcatgtacgtttggaaaaaattgttgtaaatgagcaactgtgtcttttgacggcaagtaatttagggataaaagtaccaaatagttttattataaatagccagaagatgcagggagaaaatattttatttgcaacagaacggtatgatagaaaatttaaaaaagaaaattatatgttaaaagatcttcagatcccatttaggttgcatcaggaagattttgcgcaggcgatgggaatttcatcttcaatgaaatatgaaaaaaaaggtgatcattatctaaagaaaatgtttgaagtgattaaaaaatactcttcaaatccattagaagatcagaaaaaattgtgggatatttgtatctttaattatctaattggaaatacagataatcatataaaaaatgtatcgttgctttatgcagagaatttgaatgacattcgtcttgcgccggcatatgacatggtcagcacaatgatttatgagagtagcacagaaaatatgtctttaggaattggtgggatttatgatatacgaaaaattacaaaagaatcttttgaggatgaagcggtagctatcgggttgggtaaaaagtttgcaatgcagagaattgacgaaatgagagaaggcgtccaagatgcgttaaatgaggcaacagaaagtttggcagcagaaggatttgattctgcagaagaagtaaaagaaagaattatgcaaagaggaggaattcattatttgtaatatttgcggggaatagtattcccaaaaggatagatgatagacggctaaaagaggcgagcaaaagcaaataaagtgaatgggttactaaaatatgaaaaatgaaacttaatgaaataaaatcgaggagaataatatatgcaaagtgatatgttagcaaaatgtatagcaatttcgcaatctcattttttgaatgttccttataaagatttaacaattgatcaaatatatggagtagatggcattggaaataaagcatcaagaatttgtcattattgttctgtagatgtactcaaaaatattttagaaaacgaaagtttgcgatttagtgacgtgcgttttttaaatgattctacagaatttattgaaattattcccttagtgaaatatgttgcacagcatgaagaatacgcatcagagtttatagatatgattcttaatgacagtcttataaaagaattagaatcttatagacaaccatatataggaaaagaaaaaaatacgcaaaattatgcggaaaaagtctatagaacatatacgtgttctttttcaacgaacaaagattcacttactatgtggaattattatgcaacatctggaagtggtgttaatcttatttttgattttgcatggaatttgtttgagggcagcgatatctcggaagtaaataatagtagtcatttggaaaatgatattactatttgccgaggactggttttatatcaaagaatggataaacaaaagtgtattaaagctcttctagataatttatatgaagtatatttacaagaagataccattgaaaaatgccagagtcatattcaatgggcattcaaagaggcgattaataatatgagatgttttttcaaaaatgattctttttcatgtgaaaatgagtatagggttatattgaaaataccagaagaattattattggaagaaactactggacaagatggaattctaaaaaaaggccaatttaaacgtggaaatattttaataccttatgtggattataaatttaaaagggatagcttaaagggaattacgttgaatccttatgtcaaagaaaaagaaagtgtatttgaattgggaatcagagaattattatggcagaataaaattcataatgtacagatttatcgttcagcaattccaatgagaaaatatttctagcaatatagggctaagtatgtagtatgtttgtaataatttaataatttcatatcaggtgttacaccctgtgttacactcgccaagacgctgtgcaaaacctccatttctaggcgtttctgagtgtaaataccgggttcgaacccctgatcgcgcactaacaatcactgtttttacagacataggagctgtggggacggtgatttttttatatattaggaaagtcctttcctaatatataaaaaacgctccgcttaggatgcgcactgcggcgtacaaggtagatgtcgcaagcgaccgccgcaggcgcaagaatgtgccgaggcacattctttgttatgcccacattaagaggtcacaacagaactaactctgttgtgaccatcctgtcattccacgaaaagacatcatgttattacggagaatgactattgtttaattcagatcggctgtcatttctgcaaccatagccagattgtcgttcgtactctgatccatatctataacctgaacatgaatctggtttgtatctgtctgctcaaactgaagctggatctcatacatcccattttctggatctgttgttgttccgccgaatttttccagcttgtttccattagcatctgtaagaatcatctgtacattttcatattcttccggtacttcgagatacaaataagtggatgccggtgctttcacaatcttacttactgtaaatccattgtttgctgtatttacctcataagtatttaacaggcttgtgtctgtatctaccgtaaatttaagattccactgacctgtgatcagattttcaccttctacataagttgccggttcaggttgattctctacctttgcatacaactcagtgaatttaatatctacagtggacagatctttaaatgttttgtcagccaaccatccggcactgatatgccccaatccgacaaagcttccatcctctgcttttttcaaggacaattcagctcctgtctcttccccgtttacataaacctgctggcttttctcaggcaataaatagtccttttgatttacctgatcattatctgttgttgctgtcatagtaaaatacatttcatatccatcacaatatgcatctgatactgtcactgtcacgccattgctttcggcttctgatcctggattctgcacactttctgaattgtctgcaatctttccatatgctgtcttgtccttttctccatatggcgtattctccttatttttctgcagttttgcaaagacatctccaatcactggaatattcttcgccagtactgggtttgcataaaatacgcttcctgacactgcaatcactgctaccgctgctgcggccgctgtccatgctcttttcttcttctgattgccattgtttagttttttcatcgtaacattcccctgtccgatttctctatatgcatcctgaattttctgttctacaacatctgggatttccaggttttttttcaattcttttttcatcttttcctcaaatgacatcatcaaaacctcctttttgcttgcattttctatcagctgcattctaaaagcatcctctattcaaattggaattccgggtgttctttcaggtatagctttttatatactcctcggcccctggaaagtcttgtcttcactgtgttttcattcatctgtagtatttgactgatttcccgtatgctcatctcttctacataatataaaatcaatacaacccgatattgctgttccatctggtctaacagctccagaaagtcttcattgattgttgctgctcccggaggtgctgcaatcttttcttctgctttctttccttttgtatcttctgccccataatagtcctcaattccgactactttcttctgttctctaagcatctgattacaattattgattaatattctgagcagccatgtcttaaaatactgtgctttttctaattctttcagcttttcatagcaagtaaggatgctttgctgaattgcatctgctgcatcaaaatcgttttttaaaataccgaccgctactttatacatggcctgcttattttcttctatcaattccacgaacgcctgatcatctcccctttgcgcccgctttacaagagatttcatttatacgccaccttctttcaattgttttcaagcttcatctcaaccgattgatacttattagatgaatttatggcataaaaagtttcaaaaatggtacaatctatagataaagaaagagtgatggaaacaataaagcacgaaaaatctgttgtagatttttttacaggtgctggaaccggaactattgtatcttgcttattttcaccgaattcatcggtaagaactacggttattattgttggaattataatggtatgtattggatggtataaaaaatcaaagagtgacaaaaaggtatttcaatatattaaagaacatgattaaatgaattttaggcaggaactgccagtcgttgaaggaatcctcgtcattgacggggattccttcatggaaagagaaagcttgttacttataattttgcaggatttacatgaaccatgatatgttttactttaggaaaagtcttttcgatatcgttatgcactttttcggccacatcatgtgcattctgaagtgtgatggagccatctagagcaatttcaacatcaacatagattttatttccaaaaattcgagttcgaagtacgtcaatcttatgaacatttggattgcgcattacgcagttgcgaagttgagtctccatttcttcgtcacaggagtggtcaaccattttgtcgattgcatctttgaaaatatcggaagcagcctttacgataaatacaaaaatcactaagctggcaatggagtccatgattggaaatccaagtcttgaaccggcgattccgaccaatgcgccgatggaagaaaatgcatcggaacgatggtgccaggcatctgccattagtgcactggaatcgattctcttggcatgatatctggtgtaccagtacattgcctctttacttgcaattgaaattatggcggcaatcagtgctaagacacctggtgtttgtatgttgtcagaatttccctgcaatatcgttttgaatgcttcgattccgattccaaggcctgtgataagaagaacgattgcaaggacaattgcagctacacactctaggcgttcatgtccatagggatgttctttgtccggcttttttgatgcgagtctgattccgataataactataaatgtactgaatacatctgatgcggaatgaatagcatcgctgatcatcgcattggaatgcgcaacaattccggcaaaaagtttgagcagagatagtgcgatgtttccgataatcgtaatagtagagactttgttggctactttttggaaatcttcttcatttgcgacaggatttccggttttcattgtgctgttttccatatgtgttacctccaatttaataaaacaattaaaagatagctctatggcactaaatatatgtgggaaaataaaagaattgttttaaaataaaaacacccacgaatcagtattagcaactactgtcccgcggatgaaagattccactgtcgcatctgcgacccgactccatgatatgatatcacggtctgctcagtttgtactgtagatttatatgcagtgcaaagagttatagtagatatagcataaaaaagttgagtttgtcaagaaaaaccaatcggtttttgattacaaatcttaggaagagataaggttgcgcaacgaaataagttgcttgcggtcttcttttttgagtgataagataaaaagtacttgtaagatgaagagagtgaggtagaaaattatgtattatgtaccagatggcacaaaagagtgtggatattatgaatgtaaaaaatgtggaagtcgatttttatcactgcagacaatgaatacaattccttgtccggattgtgggatggatattgactatgaaattggaccggatgaaactttggaagcagcggaggatacagctgtgttggtggagaagattacaggagaagaggaagttgagaagatggattcacttctgagtctggcaattaccggtggagattataattggatttaaatgatatacgaagataaaaaagagatttttcctattatagtggaaaaatctctttccattccccgggagaaagtgtctcatcgagaatgatatcttctatagaaatgcgtttcaattcgatcacgcagcagtgaacggctttcatcatgcggcgaatctgacgtttgcgtccttcgctgatcgtaatctctccgtaagtgactggatgagtaggaagattattacacacagcactctgtacttccggatgcaaagtatctattatattagaaagaatatcctgacgaaatacttttagtttcgcaggagaagtgagaacaggggatccttttaagaggattcctttttctaattgttggcaccgatcctcggttaaatcaccgagaactgtaaaatgataggttttctctttatgataagaagggtgcgtaagtttctggttgaaaactccgtcatctgtaatgaggaggagtcctgtggtttctcggtctaatcgcccaaccggatttaaattatcattgtttaactctgaaaaatagtccataacggttgggtaaaggctatcacggcgggcagtgacgcagccaaaaggtttgttgaacatataataatgaaacatattgtgcctcctgtgcctttataagtgaaataaatagatgagattgattatacagaaaaataatggatttcacaaggtgtgtcgcttatacttgccattggctgtgggaatgcagtttacgcatctgcaacaaccgaaagaactgacgtcctttcggttaagggcattcgccctatgttccccaaccctatcagcttactgcaagcaagcttgcaaaatctgttagggtcggggaacgcagatactaatttttcagaatattctgaattgcatgaaatatataaaaaacattgacaattaaaaacagctgtgataagataaccttcgtcgctgaggaacagcaaagaaaacaacagaggaacggaagataaaagaagacgcggaggcgggacattcttgatcggaaggaaactggaagatttaaaaatcaatgaaatgattgaaaaataaatcaaaaaagttgttgacaaagagttctgaaagtgatatcctaaataagctgtcgcgtgagacggcaaaggaaagctcgaaaagagcgacaaagaaaaataaaaaagttcttgacaaagacaaaagcttttgatagaatataaaagctgtcgcttgaaaagaacgacacaaacaaagaaccttgataactgaacaatagacaacaacaacccttgaaaatttctttaagagaagatttttaagaacggtttttaaacaaaccaaaacaacagtaaaaagggaagaattagctagttagttggttctgaactggatacaaacacttttaacgagagtttgatcctggctcaggatgaacgctggcggcgtgcttaacacatgcaagtcgaacgaagcaccttgatttgattcttcggatgaagatcttggtgactgagtggcggacgggtgagtaacgcgtgggtaacctgctctcatacaggggggataacagttagaaatgactgctaataccgcataagaccacagcaccgcatggtgcaggggtaaaaactccggtggtatgagatggacccgcgtctgattaggtagttggtggggtaacggcctaccaagccgacgatcagtagccgacctgagagggtgaccggccacattgggactgagacacggcccaaactcctacgggaggcagcagtggggaatattgcacaatggggggaaaccctgatgcagcgacgccgcgtgagcgatgaagtatttcggtatgtaaagctctatcagcagggaagaaaatgacggtacctgactaagaagcaccggctaaatacgtgccagcagccgcggtaatacgtatggtgcaagcgttatccggatttactgggtgtaaagggagcgtagacggagtggcaagtctgatgtgaaaacccggggctcaaccccgggactgcattggaaactgtcaatctagagtaccggagaggtaagcggaattcctagtgtagcggtgaaatgcgtagatattaggaggaacaccagtggcgaaggcggcttactggacggtaactgacgttgaggctcgaaagcgtggggagcaaacaggattagataccctggtagtccacgccgtaaacgatgactactaggtgtcgggcagcaaagctgttcggtgccgcagcaaacgcaataagtagtccacctggggagtacgttcgcaagaatgaaactcaaaggaattgacggggacccgcacaagcggtggagcatgtggtttaattcgaagcaacgcgaagaaccttacctgctcttgacatctccctgaccggcaagtaatgttgcctttccttcgggacagggatgacaggtggtgcatggttgtcgtcagctcgtgtcgtgagatgttgggttaagtcccgcaacgagcgcaacccctatctttagtagccagcggtttggccgggcactctagagagactgccagggataacctggaggaaggtggggatgacgtcaaatcatcatgccccttatgagcagggctacacacgtgctacaatggcgtaaacaaagggaggcagaaccgcgaggtcgagcaaatcccaaaaataacgtctcagttcggattgtagtctgcaactcgactacatgaagctggaatcgctagtaatcgcgaatcagaatgtcgcggtgaatacgttcccgggtcttgtacacaccgcccgtcacaccatgggagtcagtaacgcccgaagtcagtgacccaaccgtaaggagggagctgccgaaggtgggaccgataactggggtgaagtcgtaacaaggtagccgtatcggaaggtgcggctggatcacctcctttctaaggaagaaaaaaagtagagagtttttactgttgtctattgttgggttatcaagtaacctaaaccttttggtggcgatgcgcttaggggtaacacccgttcccatcccgaacacgatggtaaagacctaagcggccgatggtactgcactggagacggtgtgggagagtaggtggccgccaaattaaaagaaagaaactaaggcagagacgctgccgaagttgaacatatagatacaggcaaagatgagcaacaacttatcaccgccaacccaatcagcagggcagtgctgttatgatagctggtttcaccagtgattagatatacaaagagatttgtgtatgtaatgactgatgaaaatatcagtcggatgaagaactgaataagaacttcatcttatgtaccttgaaaactacatatagtaaaaatcaatagatttagataaatatctaatcaagacatccgaggtaatgttaacaacattaacttacagtctgaagaaaacagacttaaaataaattgactatcaccaacgcatacaacgctatgtatgtgtggacgttatcccattcccgtgggatgaggtcgagttggttatgctgataagagcgtatggtggatgccttggcactaagagccgatgaaagacgtgataagctgcgaaaagcttcggggaggagcaaatatcctttgatccggagatttctgaatggggaaacctacttgagcaaacctcaagtatccttaagccaatacataacttaaggaagggaacccggtgaactgaaacatctaagtagccggaggaagagaaaacaacatgtgattctgtgagtagcggcgagcgaaaacggaagagcccaaaccagcgtgcgtgcatgctggggttcggaccgcggaattgattcaacgagtttagcagaacggttttgggaaagccggccagagagggtgaaagccccgtaagcgaaagacgagttgacatggcgggatccagagtaccacgagacacgtggaaccttgtgggaagatgcggggaccaccccgtaaggctaaatactacttagtgaccgatagcgcatagtactgtgaaggaaaggtgaaaaggaccccgggaggggagtgaaaaagaacctgaaaccatatgtttacaagctgtggaagagctttatatgctcaaccgcgtactttttgtagaacggtccggcgagttacgctggctggcgaggttaaggactaaaggtccggagccgaagggaaaccaagtctgaatagggcgcatagtcagtcggagtagacccgaaaccgggtgatctatccatgtccaggttgaagttgccgtaaaaggcaatggaggaccgaacccacatccgttgaaaagggtggggatgaggtgtggataggggagaaattccaatcgaacccggagatagctggttctcctcgaaatagctttagggctagcctcatacgagtcttgcggaggtagagcactgaattcctaagggggcgtcaaagcttactaagggatatcaaactccgaatgccgtgtagatgatgtatgggagtcagacgatccgagataagttgggtggtcaaaagggaaagagcccagaccaacagctaaggccccaaaatgtgtgttaagtggaaaaggatgtgggatttcgaagacaactaggatgttggctcagaagcagccattcattcaaagagtgcgtaatagctcactagtcgagaggtcctgcgccgaaaatgtccggggctaaaacacactgccgaagctttggaattgagaattcaattggtagaggagcattcttaaagggacgaagcagtaccggaaggagctgtggacttttaagaagagagaatgccggaatgagtagcgagaggaaggtgggaatccttccggccgaatatctaaggtttccagagtaaagctgatctgctctgggtaagtcggggcctaaggcgaggtcgaaagacgtagtcgatggataacaggttgaaattcctgtactatcctgtaacagaactgtggggacacaggcagagagcgtgagccgggaatggaaagaccggtacaagcgaggtaggagaagagttggcaaatccgctctttaatctgaagacgtgatgtggactgaaaataagtagggaagcacgtgagctgactgtcaagaaaagccgctattgtttgcaggatacccgtaccgtaaaccgacacaggtggatgaggagagaatcctaaggccgacgggagaagcattgttaaggaactcggcaaaatgactccgtaacttcgggagaaggagtgccagtaagatggccgcagagaattggcccaagcaactgtttagcaaaaacacaggtctatgcaaaaccgaaaggtgaggtatatgggctgacgcctgcccggtgctggaaggttaaggggagaggttagcgcaagcgaagctttgaacttaagccccagtaaacggcggccgtaactataacggtcctaaggtagcgaaattccttgtcgggtaagttccgacccgcacgaaaggcgtaatgatttgggcactgtctcaacaatgcacccggtgaaattgaaataccagtgaagatgctggttacctgcgccaggacggaaagaccccatggagctttactccagcttgatactgggattcggtattgcatgtacaggataggtgggaggctaggaaatggtaacgccagttgccatggagccaatgttgggataccacccttgcagtactgggtttctaaccagcagccgtgatccggctgggggacaatgtcaggtggggagtttgactggggcggtcgcgctccgaaagggtatcggaggcgctcaaaggttccctcagaatggttggaaaccattcgaagagtgcaaaggcagaagggagcttgactgcgacaccgacgggtggagcaggtacgaaagtaggacttagtgatccggtggtataaagtgggattgccatcgctcaacggataaaagctaccctggggataacaggcttatcactcccaagagttcacatcgacggagtggtttggcacctcgatgtcggctcatcgcatcctggggctgaagtaggtcccaagggttgggctgttcgcccattaaagcggtacgcgagctgggttcagaacgtcgtgagacagttcggtccctatccggcgtgggcgtaagatatttgagaggagctgtccttagtacgagaggaccgggatggactggccgctggtgtatctgttgtcttaccaaaggcatagcagagtagccaagccgggaagggataaacgctgaaggcatctaagcgtgaagcccccctcaagatgagatatctcataacgtcaagttagtaagaccccttgaagacgacgaggtagatagggcagaggtggaagtgtggtaacacatggagctgactgttactaataggtcgagggcataaccaaagcagtgataggtttggatgatgatgttggttttaactgtatgtagttttgaaggtacatggaatatagacaggaatgagaagcagtgcgaaagcgctgtttttttcttgcaaaaaaatcaagtttcttgacaaagaaaagattttgctatatgtatatatcagatgaggattgtgtgtctcacggcaaaaatgctggtggcattcttgaaaaaagtatatagaaaagatgggacaataaatgaccaagggaagaatcataatagctgatatagaaaaaatatcatgtaaggaagagtggattctctcacagatagcacaaagatatgttgaaaagtatcagaagcataagagagaaacggataaaaaacaggagctgatagcgggatatcttttaaaagagtatttaggtgtagaaaatgatgctcagcttgtaatgaataaaaatgggaagccgatgcttgtggatgcgagaaaacattttaacctgtcacatagcggtaaatatgtagttctagcgattgctgatcaggaagtaggcattgatattgaacgtgtgcgtccgtatcatgaagctacagcgaagaagatattttcgaatgaaatacaaaatgcaatgtctgaactttgtgggaaggaaaaagaccggatatttactcaattatggacagaactagaagcgaagctgaaagtaaaaggcattggatttagcaaagaatggggaaatgaaaaaacaaaggaatattttattgagacaagatgtatagatgaatattatgtaagcttagcgacagaagaaaaaatttctatagaaacagaatggtttgcagggaatggaaaggaagtaaaatagtatgattaagcctattatgagagacatatttttcttaaatcagaaatcagaattggcaacagaagcggataagcaggtggcaatagatctgctggatacactgaaagcaaatgaagcaggctgtgtaggaatggctgcgaatatgatcggagtaaaaaagagaatcattgcagtgaatatggggttgtttaatattgctatgtttaatccgaaaatcgtgaaacgcacaggcgcttatgagacggaagaaggttgtctgtcattggatggagtgcgaagctgcagacgttatcaggaaatagaagttgaatatcaggatatgaatttcaaaaagaaaagagaaaaatacagtggatggacggctcagatcattcagcatgaaatagatcattgcgatgggattttgatataaattttgtttgtgcattgaggaggtgtgtcgcatggatttcaagtattgcaaattagaaatctttattccagaaacacatatttcgcagctacagaaagcgttgcagtcagtagatgccggtcatataggaaattatgattcctgtatgtcctgctccaaggtcaccagttactggagaccattagatggaacttctccttacattggaaatgtaggcgagattagttgtgagccggaagtgaaagttgaagtgactgtatttacagaaaaagtggatgaagcaattcaggcaattaaagaggtacatccatatgaggaaccggtaatcaatgcattgccgatttatcggacaagcttttaagggaaaaagaagtcttacgatcagacagaaaggagacttcttttattatacaacagattctgatttcatgcatagaatagttaagagaaaatatcggcaatcatggaataatgcctatgagattttgcaaattgaaggaaaaggaagttgtgaatatctgcaatggcaagtgccttggaggtgtagtagatctgcagataaatgtatgctccggtgcgatagaagcattgattgttccgggaccgggaaagttctgtggattctttggaacggatagcgaatatgtgataccatttgcatgtataaagaagattggaccggatattattcttgtggaaattaaagaagaaaagtttttgcaaaaatattagacattgtgtataatgaaggcaataagatacgtggaaaggcggagtggattatatgaagtgtccatattgtggcaatccagatacaagagtgattgattccagaccagcagaggataatagttctatcagaagaagacgttcctgtgatgaatgtggtaagcgttttacaacttatgaaaaggtagagacaattccactgattgtaattaagaaagataataaccgtgaacagtatgaaagagcgaagatagagaatggagttctgaatgcatgctacaagcgtccggttccggctgaagagattcaaaagacaattgatgcgattgaactgtcaatttttaatcgtgaagagaaagaaatcccaagcagtgagattggtgaaattgttatggagaatctgaagacattggatccggttgcatatgtcagatttgcatctgtctacagagagttcaaagatgcgaatacatttatggatgaattgaagaaatttctaagataataaaaatcggttatactctgttcgtgagtataaccgatttcaatctttcggagaatgttagtatgttacacgggaggcgagaatgagaacttataaattaacaattgcttatgacggaactgcatatcagggatggcagagacaggcaaatacagagaacactttgcagggaactctggagcgaacaatttcgtcagtggcaggatatccagtggagattgatggttcaggacgaacagatgcaggtgttcatgcgaatggacagactgcaacagtagttctttctggtcgggtggaggatggattttttacagaaaagataaattcaagattacctgaagatattcggattttagatgcagagcttgtgaggaatggatttcatgcgaggaaaagtgcagttggaaaaaaatacatttatcagctggatttggcggagaaaccagatgtattcacaagacgatatacatatcattttccgcagagattggatttagatgcgatgagaaaggcagcacaattgttgattggcacgtatgagtttgctggatatacggataaaaaggatgaaaagtccacaaaaagaacaatttatgctataatgatttgcggacaaggaagcaaagtcagtattcaatatgaaggaacaggatttctttaccatatggtaaggattttgacaggaactttgctggaagttggaaccggagcacgaagcatagagagtgtgaaggaacctttgaaatcaaaagatagaagtcaggctggatttttagcacctgcaagagggttattccttgatgaggtgtattattgattcggttatggaaagttgctgattattcacagaagagttggcgaatggacggtgaacagcaacactcttgaaagggaggatgcagcgtattgaaattaatatcatggaatgtaaatggtattcgtgcctgtgtacagaaaggatttcttgatttctttcatgaggcagatgcggatatcttctgtattcaagagacgaagatgcaggaaggacagctaaatctggaattagaaggctattatcagtattggaattatgctgtgaagaagggatattccggaacagctgtgtttacaaagaaagaaccattgtcggtgagttatggaatcggtattgaggagcatgaccaggaaggacgtgtgattacgtgtgaatttgaagagttttatttcgtcacagtatacacaccgaattctcagaatgggctggcaaggttagattacagaatgaagtgggaggatgacttccgtacttatctgaagaagttagaagagacaaaaccggtgattgtgaccggagatatgaatgtagcgcacaaagagattgatcttaagaatccgaagaccaaccgtaagaatgcaggttttacggatgaggaaagacagaagtttactgaacttctggatgccggatttattgatacattccggtacttttatccggagcagacaggaatctattcctggtggtcttatcgtttcagtgccagggcgaagaatgcaggctggcgtatagactacttctgtgtctcggaaagtttaaaggacagactggacgatgcgaagatacttacagatattatgggatcagatcattgtccggttgaattggatttgaaataatagaaagaggagaagagaacaatgacaaagattgacattatttcaggatttcttggagcaggaaagacaactttaattaagaagcttctttctgacgcatacaagggagaacaggttgtattgattgagaatgaatttggagagatcggtattgatggtggatttttgaaggaagcaggaattgagattcgtgagatgaattcaggatgtatctgttgttcactggttggagattttggaaaatctcttcatgaggtcgtagatacttatcatccggatcgtattctgattgagccatcaggagttggaaagctttctgatgtaatcaaggctgtacaggatgttcagggtgagattgatgcagagctcaatagctttacaacagttgtagatgtaacaaagtgcaagatttaccgtaagaactttggcgaatttttcagcaatcagattgaatatgcaggtgcagttattttaagccgtacagataaagcgaaaccggagaagattcaggaaagtgttgcactgttaagagaattgaatgaaaaagctccaatcatcacaacaccgatcgagcagcttccgggcgagaagattcttgaaacaatggaatcaagcaaatctcttgaagatgagttactcgcagaagtatctaaagaagcacatgatcacgagcatcatcaccatcacgatcacgaagagtgcgatcacgagcatcatcaccacgatcatgaagagtgcgatcacgagcatcatcaccatcacgatcatgaagagtgtgatcacgagcatcatcatcacgatcatgaagagtgtgatcacgagcatcatcaccacgatcatgaagagcatgagcaccatcatcacgatggagagtgcagttgtggatgcggacatcaccatcatgatcatgaaggtcatcatcatgcagatgaagttttcacaagctggggtaaagagacaattcatacttatacaaaggatgaggtcagtgcaattctgaagactcttgaagaggacggctcttacggaaatgtactccgtgcaaaaggaatggttgcaggtgcagacggtgagtggatctactttgatatggttccagaggaacatgaagtaagaacaggagcaccggaatacacaggaagaatctgtgtgatcggagcagagcttaacgaagacaagcttgcagaattatttaaggtgaaataaaaaggataagcaaagcagtaccccatagggggctgcgtagcattatgtaataacagatgtcttctgcgaaagggagacggaatggagatagatatgatgaaagagccagatgttatggtttatctgatgacaggttttcttgatagtggaaagacacagtttctgaattttacattgtcacaggactacttccagatcgacggcaagacacttctgattctttgtgaagagggagaagaagagtatgatccgagagaattgctgaagtatggtgtcgttattgagactgtagaagataaagaagatctgacagaagaatggctggaagagatgaataagaagcacaagccggaacgtgtggttatcgagtataacggtatgtggcaggtgagtgaatttgagaagatgaagcttccggcaggatgggctattgagcagaagatcacaacggtagatgcaagtacattccagatgtatctgacaaacttaaaaccactgtttgtagagatggtaaagggtgcagaacttgttctgttcaaccgttgcgaggataagaaaccgttggcaggataccgcagaagtgttaaggttgtaagccctcaggcagaagtaatctttgaggatgagaacggtgaggtagacaatatctttgaagacgaagtaccatatgatctcaaagcacctgtgattgagattccaagagaagattatggtatctggtatattgatatgcaggagcatccggagcgctataaaggaaaagttgtagaatttgttgcaaaggttatgaaaccaaaagcatttccgtctaaggtattctatccggggcgtatggcaatgacttgctgtgcagatgatacatctttccttggatatgtttgcagaagcgcttatgcgccgaagctgaatgcgggagactgggtaaaaattcgtgcaaaagtgcgttatgcgaatctgtccgtatacggcggagaaggaccggtgcttgaggcagagaatattgagcctgcagaaccaattgaagagttagtatattttaattaagacaagcaataagacaaagtaataaaacaagaaataggaggagaacttcatggcaaagaagtatgatgtaatcgcattaggagagcttctgattgattttacaatgaatggacaaagcgagcagggaaacaatatgtttgaggcttgcccgggaggtgcaccgtgtaatgtgctggcacttctgaacaagatgggaaagaagacagcatttataggaaaagttggaaaagatcagtttggagcgttattaagagatacgattacggaagccggaatcgatgcctccaatctgatggttgacgaaaatgtgaatacaacactcgcatttgtacatacattcccggatggagacagagaattctcattttaccgtaatccgggagcggatatgatgcttactgcagatgaagtgaatccagaagtagtaaaagatacaaaagtctttcattttggaacactttctatgacacatgaaggtgtgcgtgaagcgacaaagaaagcggtagaaacagcaaaagcaaatggttgccttgtatcctttgatccaaatctgagaccgccgctgtggagctctcttgatcttgcaaaagagcagatggagtatggatttggaaaatgtgatatcctgaagatctctgataatgaaattcagtttgtatccggtaaggaagactatgatgagggaatcgcatatctgcaggagacatacaatattccgctgattcttctgactatgggaaaagacggaagtagagcttattacaaaggcatgcgcgtagagagaccgggattttcagtgaaagcaattgagacaactggtgcaggagatactttctgtggaagttctttgaattatctggttgatcatgattttgagaatctgacagaggaacagttaggagagatgctgacatttgcgaatgcggcagcagcacttgtaacaacaaagaagggtgcgatcaaagcaatgcctgtaaaagaagaagttcttgaactgattcagaaataattgacaagaaaacagtcaatcattataatgtaacacagaaacaagggcgtttccaacttaggtggagaacgcccttttatcgtatcagtttatgataaaggaggtcgaaaaataatgcataactatacaagagatgatatttttcacatagtagaggaagaagatgtcgctttcatcagattgcagtttacagatatttttggaacgatgaaaaatatggcggtaacagtaggacagcttgaaaaagcattggataaccgctgtatgtttgatgtttcttccttggaaggggttgcagatgaggaagaatcagatatgtatttatatccggatttgagtacatttgaaatctttccatggagaccacagcagggaaaagttgcaagactgatctgtgatgtgtataaaaaagatggaacaccgtatgaaggcgatccgcgttatgtactcagaaaggctgttgcggaggcgaaagagatgggatatacgatgaatgttggcccggaatgcgagttctttcttttccatacagatgatgacggtagaccgacaacagtaactcacgagcagggaggatattttgatgtagggccattggatcttggagaaaatgcgagaagagatatgatcttaacattagaagatatggggtttgagattatttcctcacatcatgagattgcgccggcgcaacatgaaatcgactttcactacgatgaggcgatgattacagcagataatctgatgacatttaagatggttgtcaagacaatcgcaaaacgacacggtctgcacgcgacatttatgccaaagccgaagagtgagacttatgggtcaggaatgcacattaatttatctttatataaaaacgatggaacaaatgcactttataacgcagaggatgagaacggactcagtcaggaaggatattattttattggtggcttgatgaaacatatgaaggcaatcacctgtattacaaatccaacgatcaattcttataaacgttttgtgccggggtatgaagcacccgtttatatgggatggtcagctaagacaagaggacctttgatccgtgtgtctatggagaaagaagacaattcaagactggaacttcgcagtccggatgctacggcgaatccatatctggcacttgcagtacttctgaaagcgggactggatggaattaagaatcagatcatgcctccgaagaatattgatgaaaatattcagaagatgacgcaggaaagaagagatgaacttcaagtggaagaactgccgagaacgcttggggctgctacagcagagcttgagaaagatgaactgctgatcagcgtattagggaaagagcttgccgagaagatcataaaagcaaataagaaagaatataaagaatattgtatgcaggtgacagactgggagatcgatcattatctttacaggctgtagttcaggtatcctggcatttggcatttagagagaacggattgatagaagagtagttagcggaagaggtgagcagatatgagcaacattattgtcgttttcccaaagagggaaaatgcagtaaatatccgtaatagtttggttcgtgcgggtattgaagtatctgcggtatgtttgacaggagctaaggttttgcagtatgctgataactggaacaatggaattgtcgtgtgtggttatcggtttcaagatatgcagtatacagatttacgagaatctcttccggatacgtttgacatgcttttggtggcttcagcagataagtggatggatggactgccggatggggttgtaggacttccactcccaatcaaagtttatgatttggtaaataccgttgaaatgattcagcagacacagagcaggaagagaagaaagcgcagagaaacgatacgaaagagagacgattctcagagaaagataatcgatcaggcgaaagcgcttctgatagaacgaaataacatgtcagaagaggaagcacatcgatatttacagaagagcagtatggaaagtgggaccaatatgctcgaaacagcacagatggtgctgacaattatgaatgaataagaggcagctgttaacagtaacgaataagaagtgctgtaaacaataacaaatgagaggactgtcagtgatgacagtggaacggagaagaaaatgaaatttacaaaaatgcagggaattggaaatgattatgtgtatgtaaactgttttgaagagaaggtagaagatccatcagcgttggcaatccaggtgagtgacagacattttggaataggatccgatggattgatcctgatctgtccgtcggaagtggcagactgtgagatggccatgtataatgcggatggctctagaggagaaatgtgtggaaatggagttcgctgtgttggaaaatatatgtatgattacggcctgactgacaaaacagagattacagttgagactttagcaggaatcaaaacacttcagcttttcgtagaaaatggaaaagttgcgaaggttcgagttgatatgggaagcccaatcttgacaccggcagaaattccggttgtggctgagggagataaagctgtagatgaaccgattcttgtggatggaaaagaatatcatatgacttgcgtatctatgggaaatccgcacgcagttgtttatgtagatgatgttgataatctttcgattgaagaaatcggaccaaaattcgaaagccatgagagatttccaagacgtgtgaacacagagtttgtaaaagtactggatagacatactgtacagatgcgtgtttgggagagaggatctgcggagacacttgcctgcggaacaggagcatgtgctgtagctgtttcctgtatcctgaatggattgacagaagatgaagtaactgtaaagcttcttggcggagatttggagattcagtgggatcaggagaagaacacagtttatatgacaggaccggcaaccgttgtatttgatggggagctgaaataaagatttgatgaatagataatggtgcgttgactgattttcatttttgtgaatttgaggtcaacgcattttgtttataatattgacttaataacaaagagactataacaaaaaagagattacaatctgtaatctcttaaaacatcggagtgacaagattcgaacttgcgacctctacgtcccgaacgtagcgctctaccaaactgagccacactccgataaaatagggaacttgccgaagcaaattcccagctacggaaaagggacttgaacccctactaacagagtcagagtctgctgtgctgccaattacaccattccgcattacttgagttttgtttgttgcttgtttcaaacaacatggttattatatcaaagctacagaaaaatgcaaccccttttttgatatttttgcgttagactttttaaagaaattgtcttaaatgtcagaaaattaagataattcatttcgccaaacgaaaaagggtatcgacggtagcgaaaaaagcatcaatggcagaaaaaagggcatcgacagttactaaaatctataagatcactctacaagaaaagctctgcaataaatacaactgcgcaacaaagaactgcgaccggcagcagtccggcaccacaccatgcggctacaactccaacaacgagagcgagaactccggagattggagactgtgtggcatgaaggatcgccgggaatgtcatcactgctagtgtgacataaggtacatagtatagaaaggactgaagaaactggttcttcaaaggttttcgaatcaaggtcatcggcagtacgcggattaaataagagataccgcccatgataagaatataaatataaatattgtgtgtcataatttttattccttctgagtaattgaacagttacgtttttattattgcttagttgaagctgaagtttcatcttctgtcggtatagggaagaagaacgctgctccggctgaaagtacgacggtcagtatgattgttctggtaccatccgacagagtggagatccaaggcaggcaagttgctgcgaagcttgagataaatgcaagagtaaccagtcccgcaacgactttattctgcttcgaaggaggaatgatgatagcgataaacattccaaagagggcaacactaaatgcactgaccatacgcggtgacatgatatttccggcaatgacacctagcatagttccaaaagcccagcccggaagcggagttaccatcgcgccataggtataataaggatttaaagtacctggtctgctgatcgcaattccaaaaagttcgtctgtgatatcataactcatcagcagacggtgtcctaacgaaaggtcgggacttaaacgctgactcatggcacagctcatcagaagataacgtgcattcgtgatcaatgtgacaattgcgacctcaatataaggagagtttgcagcaattacagtcagtccggcatactctccggcagatgcattatttaacagactcataaggaatccctgaaatgcattcaggccgatatttcttgcggcgataccgattgaaaaggagaccgcaagatatccaagtccgatcggaattccatcgcgaaaaccacgacgaaatgcctggctattagattctttcataataataaaccaccttagttacaaattttgtctctgagggatattgtatcatttttgctgaggaaatcaaagtcggaaatgaggccaaatcctccaatttataacatttcttgacgcatttgtgtaagtgtgatagaatgaccccgttgtaacatataatttaatacagatgcgtgaggtgtcagtcagatggatgatggcgtcctgattatgaatgatcagaggaacgacgtggaaaatctggactggtgaaaagggaaacaggtgagaatcctgtacgaactcgtcaccgtatttcgtgagcttgtgttttgaggccactgggagaccgggaaggtgaagcagaagcatttgaacgatcagccgggagacctgcctttcgcagtacaggaatgaagaattcatgccacgaggaattggccgtacgaaagaaaatgatttagactgcagtaattatttacagatagattgtaaatgatcatcggtttttctttgcgtaccctcgtttgattcgagggtgttttcatttctgagaataagaaatcaggaggatgacaatgaaaaagaaagtattaatggttttactggcagcaacacttagtgtatccatgattgcaggatgtggagcaaagggcgacaacaacactgacacaacaaagacagagtctaaacaggacagtgatcaggaagcagcagataaagttgcgaagctgatcgatgacatttatgttcaggaaagaacagacaagacagatgagcagtgtacagcagcgaaagaagcatgggatgcactgacagatgcacagaaagaacttgttgagggagagaatgcggatccggattatttcggaagagatacaggagatgcatccaaggatgatccgctcaatgctgatgagattggtgaaaatgaaatccttgtagtaagcttcggaacatctttcaatgacagccgtgcaacagatattggtggtattgagaaagcaatccaggcagcaaatccggactggtctgtaagaagagcatttacagcacagatcattatcaatcatgtacaggctcgtgatggtgagaagatcgacaatgtggatcaggcattgcagagagcggttgacaatggcgtaaagaacctcgttgtacagccaacacatctgatgcatggtgcagagtatgatgaacttacagcagcagtagagggatataaagataagtttgaatctgttaagattgcagagccacttcttggagaagtaggagctgatgcaactgttatcaatgcagacaaggcagcagtagcagaagcaatcacagcagaggcagtgaaagatgcaggatttgacagtttagatgcagtgaaagaagacggaacagcatttgtattcatgggacatggtacatctcatactgcaaaggttagctattctcagatgcagacacagatggaacagcttggatatgacaatgtatttatcggaactgtagaaggtgaaccggaagatacatcctgcgaagcagtgatcgagaaactgaaagaagcaggatataagaaagtaatccttcgtccgctgatggttgttgcaggagaccatgcgaacaacgatatggccggagatgacgacgattcctggaagagccagtttgaggcatcaggagcatttgacagcattgatactcagattgcaggtttaggagagatccaggcaatccagcagctgtatgtagcacatacacaggctgcaattgatgcagagtaatatgtaagaagatattgagaaggtcatgcttgttcagagaaaagggaatggcatgaccttttttgaattaatgaaaggaaggatttagatgaaaaagaagctattaatggtattaatttctgtttctatgatcgcatctgtatttacaggatgtggaaatagcacagaggctaaagacagtggaaaagcacagacagaacaggcggatacaaaagaggattctgcagataaggcagatgaggagcagacagcactggaagacggaacatatacagcagaatttcagacggacagttctatgttccatgtgaatgaagcaatggatggaaaaggaacactgacagtagaggatgggaaaatgacaattcatatcagtctggtgtctaaaaatattgtcaatctgttcgaaggaactgccgaggacgcacagaaggacggcgcagaattgcttcagcctacaacagatactattaattacagcgatggaacatctgatgaggtctatggattcgacgttccggttccggcactggacaaagaatttgatcttgcattgatcggaaaaaagggaacatggtatgatcacaaggtcagtgtgacaaatccggtgaaagtagaagaataaaatgcatttgtaacctttacaaaccggcaaagaagggataagatacttttataaaacaatttataaaaggagccttggatatggctggagcggaaaagagaaatattacaaaatcaaaaatagtaaattatattataaatcacgaagcaacgtctaaagtggaattgtcgaaggatctcaatcttagtatgccgactgtattgtcgaatgtgaatgagctcttggctaatggaattgcggttgaaaccggagaatatgaatctacaggcgggcgaaaagcaaaacgaatcagtattaatccagcgtaccgttatgcggttgggataaggatcactgctaagcatgcaggatttgtacttgtgaatttgagctatgagatagagaaatatgaaaggatccgcttagaattttcaacagaggctgcttactacttacaattgagcgaagcattggaaagatttctttcagatgtagaaaacagagaacgaatcttgggaatcggaatttcaattccgggaattgttaattcgaaagaacgaatgctgatcaaatctcatgcactccaattggagaattatagtttaagctttttggaacagatcttttcacttccggtttattttgaaaatgatgccaatgcggcaatgatggcagaggatttaaataactatagaaatgcattgtatctttcattgaataacacactcggaggagcattttgtattgacgggaaattgattccgggagcgaatcagaaagccggagaatttggacatatgatccttgttccgggtggaaagaaatgttattgcggaaaacaaggctgtgcggatgcttactgtgcggcgagcgtgctgacagatgataccaaagagacactggaacagtttatgaagaaggtggaagagcaggacggacaggctgtgaaggtttggaaagagtatcttaataatctggcaatccttatttcaaatctgagaatggcatatgatatggatattattcttggaggagaagtagggggatatcttgcagatcatatgatagctttagggaaaaaagtaatggaatataatggatttgagcatgatgcgagatacctgaaagtttgttcatataagagagaagcctcagcagttggtgtggcaaaacattatttgcaggcttttattaaaacattataacgatcagaatgatggaaagttagaaaatccagagaagaaacatttttaatacatgtttcttccctggatttttttgcgcaaagtgcataaaaattatagcgaaatcttgtgcaataggcagaattgaacaataacatattgacaaaatacatttcctgaacaataatgtaattactttaataaaacatttaataaaagatattcaataaaggaggaaaacattatgttacagcaggtaatgacaaacccgggagaaattattttcagagaggtaccggttccggaagtgaaagatgatcaggtactagttaagattatgaatattggaatctgtggatctgatattcacgtatatcatggaaaacatccatttacaaaatacccggtgactcagggacatgaggtatccggtgagattgccaaggtcggaaaagatgttacagaatttcatgaaggacagaaagttacgatcgagccacaggtttactgcggacagtgttatccgtgccgccatggaaaatataacctttgtgaggaacttaaggttatgggattccagacaacaggaacagcttcagaatattttgcagtagatgcctctaaagtaacaccgattccggaagatatgtcttatgaagaaggtgccatgatcgagcctctggcagttgcagtgcatggagtgaagcaggtaggagatgtaaagggattgaatattgcagttcttggtgcaggaccgatcggtaacctggttgcacaggcagcaaaaggaatgggtgccgcaaaggtaatgatcacagatgtcagcgaccttcgtctggataaagcaaaagaatgtggtattgatgtatgcgttaatactatggagaaggactttggcgaggcaatggttgaagcctttggtcctgacaaggcagatgtgatctatgattgcgcaggaaataatatcacaatgggacaggcaattaaatacgcaagaaaaggaagtatcatcgttcttgttgccgtatttgcgggaatggcaacagtagaccttgcagttgcaaatgatcacgaactggatatcaagagcacaatgatgtatcgtcatgatgattatgtagatggtatagaacttgtaaatgaaggaaaggttcatttaagaccattgatttctaagacatttgcattcaaagattatctgaaagcatatcagtatattgatgataaccgcgagacaacgatgaaagtaatcatcaatgtgcaggagaaataggtgatcgaatcaagagaggacagagttttatcagaaactctgactaggaggtaattaatggaaaacgagagtaataatggaaaagtgcctctgatcagcaagattgcatatggtttcggagatgtcggatgtaactttagctggatgtttgtcagtaactttttaatgattttctatacagatgtatttggaatcagtatggcggcagtatcagcattaatgcttttttcaagattctgggatgcggtcaatgatccgatcgtaggtggattaacagataaaacaaacacaagatggggaagataccgtccatggctgttggtggcagcaccgatcacatcagtgcttttgatcctttctttctgggcacacccagattggtcaaatacatcgaaaatagtttacatggtaattacatactgtcttctcgtcttaggatacacctgtgtaaacattccatatggaacactttgcggtgctatgacacaggatattgatgagcgtgccaagatcaatacatctcgttccgtagcagcaatgatcgcaatcggaatcatcaatatcgtaacagtgccactgatcagcaggcttggaagcaacagtgtaaagaacggttatctgtttgttgcaattatttacggatgtatctttgctgcatgtcatttcttctgttttgcaaagacaaaagagcaggtgacaattccggagaaagaaaaaatctccattaaagtacaactgaaggccgttatgcagaatagaccatatctgcttgcattagttggacaggtgctgtttggtttcacattatatggaagaaatgcagatattttatattatttcacttatgtagaaggagatgcttcctattatacaacatattccatgtgtattattattccttcaattatcggtgcagcttgcttccagccggtattccgcaagttgaataataaaggaagaacagcatctgtttttgcattacttacaggaatcgctatgcttgtaatgttcttctttaatgtaaaagaatctccaattgtattctatgcattggcaggtattacacagttcttcttttcaggatttaacactgcaatctatgcaatcattccggattgtgtggaatacggtgagtggaaaacaggacttagaaatgatggattccagtatgcatttgtttctcttggaaataaaattggaatggctataggaactgcactccttgcagctctgcttggtaaatatggatatgtggcaaatcaggtacagaatccggaagtaattgcagttatgaaacattcattttcaacaattccaggaattttgtggattgtcacagcagttgttctgttcttctatcgtttgaataaaaaacgttacaatgaaatcgtggaagatctgaaaaatggaaaaagaggttaagaaaatataataacaaaaacgtggcccggtgcactgcaccgggccattatctatataaactattcgtaatttttggtcgaagtccggcaatcataaaagatctgtcgctaatacaatcaccgtcttcttttctatgtatgatacttttgtaattcatttgtatcaacttgatgatgttattatacggaagaattgtgaacacctcgtgtcacgaaagctaaagaaaagtaaaatttattaagagtatataatctaaaacggaagaattgtttaatccagattatagacaaaatgttgataatttcgttaagggaagactggaaatttttcacgatacatgatatgatgatgtaagtgtcaaaaagtataaattgcgtttgtgctcgcacaaataagcaatttatactttttgacacgccgaacaccgaaaacggaataaaatggtgtgaacacaccattttatgggagtttgaggtattcgaggattgcgggaattgcatagcaatggagcaatccggttacatcagagagtggcaaaatttacttttgacactcgcatcatatgatagaaaacagtaaaaaaggaaggatgaaaataatggatatcaaagaaaagattcatgcaacaacagaagaattgttaagcaatatggaaagacttgtagcgatagattcacagcttggaacaccggcagaaggaatgccatttggagagggaccggcaaaggttcttcacgaagcactgcagattgcagatgaactcggattcaagacagtgaacctggataactactgtggatatgcagagatgggagaaggcgaagagatcgttggtatcgcaggacatctggatattgtaccggcgggcggtgactggacatatgatccattcaagttgacaagagaaggagattatgtttacggacgtggaacaacagatgataaaggacctgttatggaagcgctttatgcaatgaagcttcttcgtgattcaggtgtgaagctcaacaagagagttcgtctgatcatgggatgtaatgaggaaaatggttccagatgtatggagcattataatgaagtggcagaagagttatcttgtggattcacaccggatgcaaattacccatgtattcacggagagaaaggtatgcttggcatgctggcaacttctaagaatacaaagattatttctatcaatggtggatttgtattcaatgccgtatgtgatgcatgtacagcagagattccggcagaagaaggactgaaagacagactggaagctgctttcgcagagacaaagcttcaggaatacaaagtaacagaggaagatggaaagatcactatttatgcaaagggagtatctgcacatgcaagtacaccggcatttggagttaatgctgcaggtgttatctttgactgtcttgcaaaagccggatttgaagatgatttcgtagaattctataactcacacattggtacagcatgtgacggatcaggaatcggactgaaatgcgcagatgagtttggagagcttacattctgtaacggaatcgttaagaaagaagacggtgtgatctccgctacaatcgatatcagattcccggtaacatattctgtagaagatatgctcaagatgtgcgaaggaaagctcgaagacgagaacggacgcattgagatccacacaactacaaaaccattgttcttcccgaaagagtctccacttgtagaggcactgtacaaagcttatacagatgtaacaggagatacagagaacaaaccgttagtaatcggtggtggaacatatgcgaagtccttaaaaaatatcatcgcattcggaccggagaaaccgggcgttgattaccgcatccacggtgcagacgagtacacactcgtatctgaagttgaagaagcagtacagatttacatggaagcaattaagaacttgcttgcaatttaatagatgttactaagtattgctttgatcttgcttgtaggaatgtctatgggctggatctgtaagaaaatcaaactgccaagcttgcttggaatgatgatcacggggatgatactcggcccatatgtactgaatctgttggatgacagtattcttggaatctcagccgagcttcgaaagatcgcgctgattatcatccttacaagagccggtcttggtctggatctttcaggacttaaaaagatcggaagaccggctgtgatgatgtgttttgttccggcaacgtttgagattgttggaattgtactgttggctccgaagctgatgggattatctatacttgaagctgcaatcatgggagctgtgcttgcagcagtttcaccggctgttgtagtaccgagaatggtgaagctgatggaggaaggctatggcgtgaaacaggggattccgcagctgattcttgcgggcgcatctgtggatgacgtctatgtcatcgtgctgttttcaacatttacaggaatgatgcagggacaaagtacatctatactcagttttatcaatattccggtttctattttccttggaattgggattggattattaatagggacatgtcttgcgtattactttaagaaagtgcatataagagatacctcgaaagtgttgatcattttgagtatttctctgttgcttgttgttatggaagacagtttgaatacggcgattacattttcagcattgatcgcgatcatgttcattgggatcggtttgcagaagaagagagaagttgttgcgaagaggatttctgtgaaatatggaaagctgtgggtggcagcagaagtatttctgtttgtgcttgtaggagcaacagtgaatgtcggatatcttggaaaaatcggtgtgaaagcgttagttgttatcgtaggtgcactggtgtttcgtatgcttggtgtatccgtctgtcttcttggaacaagtctcaagaagacagaacgattatttgccatgatggcttatacaccgaaagcaacagttcaagccgcaatcggtggaatccctcttgcgatgggatttgcatgcggagataccgttcttaccgtggctgttttagcgattgtgttgacagctccgctgggcgcatttgcgatcgatttctcgtataagaaattattgaaaaaatcaaaataaaaaatgttattaaaacagttcatgtagaaaaaacgaccatttatgaaagcagaccttaacggtctgctttttgtgttatgataagttcagtaaaaaagacacttgtgatatggaaaatgcaagaaaactgatcacaggtactgcgaagggtaacaaagtaacatagtacacaataaaaggtaggtttcaaaatgagtctgaaatatgaaaagttgatcagaaaaatgacactggcagagaaagcaattatgatgtcaggaaagaacacatgggagacagttgatttagaaaaatatgggattccgtctatggtaatgtccgatggaccgcatgggctgagaagacaggcaggagcaggagaccatttgggattgaatgccagtcttccggcaacttgttttccgacagcagcaggagtggcaaacagctgggacgaagcacttggagaagaaattggagaagcacttgcagaggaagcagtgacgatgggtgtcaatgtgatccttggaccgggacttaatattaagagaagtcctctgtgcggaagaaacttcgagtatttttcagaggatccatatcatgcaggaaaaatggcggcggcatatgttcgtggaatccagagcaagggtattgcagcttgtccaaagcattttgcagcaaacagtcaggagctgcgccgcatggcaaatgattccgttgtggatgaaagaacgttccgtgagatttatacaaccggattcgagattgcaattaaggaaggtaaatcaaagtccatcatgtcttcctataatgaagtaaatggagtctatgcaaatgaaaacagtcatatgctgcaggaaatcctggtagatgagtggggctttgatggttttgttgtatctgactggggcggaagtaatgatcatgcacttggtgtgaagaacggaagccatttggaaatgccgggaacaggaaaatcaggtatgtatgatattattcatgcagttgagaatggtgatcttgatgaagcggtattggatcagagactggatgagcttttaaatgtaatcttctcaacacatcaggcaacagaagacgcaaagggaaaaacatttgatgtggaagcgcatcataacctgacaaaacagccggaagcaatccttgatgtgattggatcaacagatctggatgttgttgcatatgagcagggatatatccgtaacagaaaaccgaatcaaaagttgacaaaggcagcagtagaacttgcaaagaaggcggattgttcgtaatcgtaagtaatctgatcactgtacttaaatatgtaatgttgctgtttttgccactggcattcgcaggacttccgaatattgatttcggtttcccgggaatcgacattacattattcggtgagacatttaagtggaatattatcggatatgatgcggcacatggaggtcttccgtatttctgtgcatacatgatcgcaatgctcgttggtgagtgtatcaacttcccaatccagagaagctttgtgttccgcagcaaaggaaagatctggtatcaggcgttctggtatctgatcgcattctgtattgttacatgtattgtaaactcaatcaattgtatctgggttgcagttgccggaatgtttgtaccgggatggctttacaatatcggaacaaccgtgctgaacggaggagtgtcgatggtggtattcttcttcgtgaataagattattttcccggagggagaagcaaagtagaatagagaaaagaagaacagaagaacagagcagtgcgcgttagcgtgctgtcctgttcttttaacatgaaaatcattttcaaattcatcttgacaataaaattttttgcgttaaaataaaaaaatgatttttgatagattcgagatggaagtaaagtaatgttggaatttataaaacagagcaagaaaagaaagttatattgtatccttggcatattgtatctgctgtgtattatctttgttgcaaatgatgcatggttgtatagcacacccattgcaaaactgacaaaggtcgaaaccagtgtctcaggagaagagacaggaaccagagggacgaaggagaaaaaatataagcagaacatccagggagtaatcctaaatggggaaaacaagggaaagacaataagttttacgaatgagtacacgtataccggaatgacgaaacagccatatcataagggagataaggtactgctcaatggaacaagcaagagaatgggttctggaattcgtggactgaaacgagatacagagcttatgatacttgtaggattcttaatgtttgtattaattaccattgcaggaagacagggtgcgcttacgatattgaccgttatttttaatgttgctgtttttgcaattggtttttggaaagcgggagatacatcaaatgtgctggaaatgtgcagcgggctggtgattctttttgcggttattacattggttggattaaacgggattcataaaaagacatgggcagcactttttacaacattgattgttcttgtaatgatcatgggaatctttgatgttgtaatccatcatgcagaagatcttgattattcgaccatggagtatcttggaagtattgaaaatccggatgaaattttccatgcagaaatcctgatctcaggactgggagcaatcatggatgtggcggtcgccatcgctgcatccttaagcgaaatcgttgaaaagaagccggaagtgacatttttggaattatttaaatcaggaagagaaattggatatgacattatgggaacgatgataaatgtgctgttgtttgtctttggctgtggactgatcccaatgtgtctgattcgaatgaataatgatgtgagtttaattactattataaaattgcacattccatgtgaattgtgcagatttctggtggaaagtataggaattgttctggcaataccgatttctattttggttacttctgtgatgataaaggtcccaggaatgtttcatagacagaagaaagcaagaaaggtgcagggagaaggaaaatgctgataacacttggattgattttactgattttaattatggtcgtcggtggagacagaggtgtcgtttcgcttattgctttgtgtggaaatctgttgatcttaagtcttgcaatctggcttatggcatcaggagttcctgttcttctcgttacggtttgtgtcggcgttgtcatttcctgtattacgttgttctatcaaaatggtagaaatggaaagacatggagtgcatttctggcaactatgatcacaatgctgttgctgtttttcttcatatatatcgttgtatggagaagtgaggcgggaggtcttaacgagatacaacaggttggagaagatgtattttattataatatgaacctgaatatcagtatgagaaatgttgctgtctctgttatacttctcagtactcttggagctgttcttgatatggcactgacagttaccacatctgtttatgaagtgaaaagccataaagaagatatgacttttaaagaactgattcacagcggaatgcagataggaaaagaagtgaccggaacaacggtgaatacacttctgtttgcatatttaggagaatcacttctgcttttttcctatctgcggatgcagggatattcgtttgaactactgttgaattctaaaatcatgtttgaaaattgcgcctcaatgatcttcggagcaatcgcctgcgtggttgtaatgccggtggcagcggttgcagggggctattttttccgatttaaataaacataaaatccaacgtttaacataattccaactgctgtagaaaccggtgcagcaagaccgatctttgtcaggctggcattcggctggatactcatgatgtatgccattggcagacggaccagaagtgtctggatgagtccctgtgtcataacccagagcgtcttatcatttccattaaaataaccgatcatgctgaagaggacggctgttaaaatcgtttccggtgcgaatcctttcaagtaagcaaagccattctgaataacgtcggcatccgtagagaagaatccggacaggacatctcccttaagaaatacaagagcgaagacgaaacatccgacaaccaggccgacttcgattccggtgaacatagatttctttgcacgctttgattttccggcaccgacattctgagagacgaaagaagccatagattgcatgagtgcgctaggtaccagcattgcaaagtttacgattttacaggcaacgccgtaaccagaagaagcctccagtccgagccggtttacaaaagcgcagagtgcgaggaatgacatctgtgtcaggaattcctggagcgcaagagggagtccaataatgaggaatttcttgcactgtggattcaggcagaagtcttttttcataatcttaaacggcaaattctttttgataagaagaactactgcgaagacaacactgactgcctgggcgaaaacagttgcaattgcggcaccgactgcgttcatgtggaaacctgcaacaagtatcaagtcaccgaaaacatttatgatgcatgcgacaagtacaaaaagcagaggagacttgctgtctccgagtccacggaaaatcgcagaaagcaggttgtaggcgacgatgaagaagattccgccaccgcagatacggatgtaaacagtagtcaattcgacagcttcagcaggtgcctgcatcaggattgcgatcgggtgtgcaaaacaaaccataacgatgaacaatccaactgaaatcgctgtaaatacaattgcagcaccgccaatgacggagccaatctgttccggtttcttttcgccgagataacgcgcgatcagaaccgtgatacccatagcaaactggacgactacgaaagtgaccagattcagaacctgacttccggtagaaactgcagaaagtccggaggtagaaccaaatcttccaacgaccagaaggtcaaccgctccatacgctgcctgaaggattagtgcgccaagcacaggcatcataaatgccaccagtttctttaaaatacttccttgtgtaaaatcagcagttttatctgtcattttgaatgctcctttcacacatgatgtcgtaaaatttctgaattgtccggatcatacagtcggtttcagtgtcagatatagcatcaaggtaaggaagtagctcattaaaataattttcattatacttttcagatagctccttgccatgttcggtcaaagacaagtatgtgacacgtccgtcatccggagaggagatcttttgaactaatcctttcttctccatttcttttattgtccttgtgacacccggtcgcgggatattcagaacgtcacttaaatcagaaactcttacatggtcgttctgtttctgaagctcctggatcatatccatatagcggatgtgagatgacatgataccttccggcagcggaggaagcatctcacgaattcgctttgcctgataacatgcatcgagcatgcgtttgatttttttatttgtcataataaaactcctatatagttaccaaggttaattaccatagataattatatgaagatttgaggaattgtcaagagaaaatgttgattgttatgtaaaacgattattagatgttatggaatacgaagttccgtacaccgcagttactttgatggagttgttgggtctaaagtcaaaggaatcatttcgcaagaattatctgaatccggcaatagaacttcaattgatacagatgacagttcctgacaagccacgcagcagaaatcagagatatgtgaaaagatagatgttgctgggcaaatatgaatgtggatgcagtagcagcacagattaagaaacggaactacccggcggcaatcaaagagttttgcggtgagattttgctggtcggaattaattatgatatactagacgtgatgagttggtagtgagagtggagcaagctgatctgctttccatcagcgatacgattatattaaaacaaaggaggacttactcgatgagagaagtaaaagcagtaaagattaatgcagcagattttgcaccgtacggaacattttgcagtatgacagaaccagagggatatccactggagggagagattcataaattctatccggaccgcatctcaggaacctgtgttggaacaatggcattttcaccgattgaagttcgcaaggacgaaagaattgtcaagatggcggaatatcatacaactacatgggaagggattgttgctctcgatgacgacatgcttatccatgttgcacctgcttccggcggaacaccggttccggaacttgcgaaggctttccttgtaccaaagggatgcatggtaaagatcaatgcagcaatctggcatctgtgtccacttccggcgaataatgaggtacttcatgcaatgatcgtacttccggaatgtacttatgcaaatgattgtacggttgttgaatttgaagagaaagattggtttaagataatattataaagatgaaacagattgattttgaccacggaacagttacaggaaatattttaggagcagcgttaccgatgcttgtggctcagatactgagtcttttgtacaacattgtggatcggatttatattgccaggatcccatcagtaggaacaacagcgcttggagcagtgggcttgtgctttccgattattgtgatcatcactgcattcagcaatttatttggaagtggcggtgccccgttattttcaattaaccgaggcaaaggaaacataaaaaaagcagaagcgatcatgaatacatcattttcaatgctgtgcatttgtggagtggcattgatggtgatcggaatgctgttcgcaagtccgattctggtgttgttcggggcgtcggaagaagggctgtcttacgcatatccatacatgatgatttatttgatcggaatagtcccatctatgattgcaacagggatgaacccatttattaatgcgcagggatatgcaacttcaggaatgttatcggttacaattggagccgttgccaatctgattctggacccattgtttatatttggattgaatttaggcataaaaggagcggcgatcgcaacaatcatctcccagactttatcggcagcatatgtattttatttcttgagaaagaaagcggaattgaaagtgcgggtgctgtcaaaaggagaatggaaagcatgtagagatgatgcgaagaatattgtgagccttggaagtgcagggtttatcatgcagctgaccaatagtctggtaacaatatgttgtaacagcgtcttatcaggaattggcggtgatgtatatatctctgttatgacgatcgtatcaagtgttcgtcagatggtggaaactccgatctatgctatcaatgaaggaacttctccgatcttgagctataattatggagctcagcgtccgaagaaagtcaagaaagctatctgcgtattgacttgtatgatattgatctatacagcaattacgtggagcgtgattattttcgaaccggaatttttgatcggaattttcagcacagacagtgaattacttgccgattgcgtagaagcactgaaactttatttcgcagcatttatatttatggatctgcaatatgttgggcaaacggttttcaaatcattgaacaaaaagaagcaggcgattttcttctcgctacttagaaaagtatttatcgttgtaccgcttacatatttgtttccatatacatttcacatggggacgagaggggtgtttttagcagagcctatatctaatgtgattggcggaagtttgtgctttattacaatgctggtaatgctgaaaagatctgtttgacataagaaaaaagaaataggttaaaacagtcttgacaaacctacctaagcggtgtatattatcaaaatgaacattgttcattataaattcacaatacagaaatgagatatcggaggtgagatcgtgaatcatcttgctacttcaaaagaagacatattagctgccagcagagatctgataaaggagaatggatgggctgccgtaagtatacgggctgttgcgtcccgatgttctgtatcagcaggtactatttataattattatgaatccaaggcagatttgctcagtgatacaatagagagtatttggcatgaaatcttttttcacccggaagatgaacagatatttcatgatgtcgaatcctgtatctcatggatctatgaacgattagaatacggtaatcgtcagtttcctgggttcttctcattacattcatttggttttatgagagatgaaaaaacaagtgggaagaaaagaatgatgaagacatggggacatattctgaatggattatgtgaggtcttagaaaatgatccaaaagtccgtgcagatgtatttgaccaggaatttacagagaaaaagtttgcagacatactgttttccctgattctggtgtcgatgatccggcaggattatgatccatcatctgtattgatgcttgtaaagaaaacgttgtattaaattcccacaattgctgtgggaaattttttgaatgaaaatgaacaatgttcatgtatacgtggttatgataattgggagcttttgccaccgatatcatatagattcataggaaagaaggatatttattatgcaggcaatagtagaaactttatttgacgccgtgtatttaatctcggtaattacaatcggaatcttgatgatccgtaagagcaaaggaaaccgtcagtttaccatgtttggaatcatggcagttcttttaggaagtggagatgcattccacctggttccacgtgcatttgcactttgtacaacaggtcttgagaatttcactgtacagttaggattaggtaaatggatcacatccgttacaatgacaatcttttatgttattctttactatatttggcgtgaacgttatcagatcaaaggacacaatgcaactacagcagcgatctatgtactcgcaggattaagaattgttctgtgtatgatgccacagaatgaatggctcagtgcagaagcaccgctttcctggggcatttaccgtaatattccgtttgcactgatgggattacttatcatcgttttattttacaaaagtgcaaaagaaagaaacgaccagtctttccgctggatgtggatgacgatcgtcttaagctttgctttctatatcccggttgtactgtgggctgatgttgttccgatgatcggaatgctgatgattccgaaaacatgtgcatatgtatggacagtgctgatcgggtacaaggcaatgaaaaaggaaatagcttaaggataatgcgaaggaaagcagcagacaaagaaagaacttgttatccgtttactgtagaaaaaaacagacatgaaaaaacatgacatgattaaaaacaacagaaaacattgaagatgaagaggcaacagtaaatggaaaagggaagtaccggttctaaacagacaaaaagatacagttggatcattggcttgcttatttttataacagcacttcttttgggctgtattattgtaaagaacatagagaaagaaaaaaagacagcagctgcttatactgcacaaagtacagtaaagcggatcaatgcacaattagatcagtatgttgaactttcagaatttcttgaaaacgtgattcttgcaggatatgatctgaatcagactacattctcagaattggcagaaatgcttccgaatgaagcaggtgttgtaaaagcattcgaactcgcaccggaaggggttattactgatattttcccaaagcagggaaatgatcaggcttttgaaaggcacaagcgttttcttcttcaagtaattcacctctgtttaagcatcgtatattttcgcaatgccatattatagcacagaaatcgaaagattgagtgaaatctgtgaaaaaaacaggaaaattggatggggaagtgattaggtagaaaagttgcttcttgctacacaattccttaagtgatatactgaactagagaaaaaataatccgtgtggaattacagtttcggttttacacggatttttagaaaatgagtagttagttaaaactaaccaagaaaggagatgcgtaaatggaaatttttcttggaatactgattccgttcattggaacaacgcttggtgcagcatgcgtgttttttatgaaaaaagcacttaaaaaacaggtgcagcgtgcacttgcaggatttgccgcaggggtaatggttgcagcatccatctggagtcttttgattccggcaattgaacaatctgaaaatatgggagctttatcatttttcccggcagtagtcggtttttggattggcgtgttgtttttgcttacgctggatcatttgattccacaccttcatgttggaagtgaacagtcagaaggacctaaaagtaagcttgggcgtacaacgatgatggtactggcggttacactgcataatattcctgaggggatggcagttggtgtaatgtatgcaggtctttttgcaggaaatacaaagattacagcagcgagtgcgcttgctttatcacttggaattgcaattcagaatttcccagaaggagcaattatatctctgccgcttagagctgaaggagaaagtaaggggaaggcatttctaggaggtgtgctttcaggtgtggttgaaccagttggagcagtacttacaatcattgctgcgcagctgataatcccggtattaccatatttactgagctttgcagcaggagcaatgctttatgttgtggttgaagaactgattccggaaatgtcgcagggggagcactctaatatcggtacagttttctttgcggttgggttcagtttgatgatggttctggatgtggcgttggggtgatagagtatctcaaaagtacaaaatggaaatatgaagaagtgagaaattcataaaaattcaggctcataatctccgttaatggggagattgtgagcctgtctgtgtttacaacacttgattatttgcaattttcgattgctcatctatactttaacgttttacacatgcaaaaacaagtacgtacctttttataactatacactctaaaatgtatgtgttattataaaattggaggtgaatgtgaaatgaagacaaaagatgaacttcctgtttgtccggtagcaacggccgtgtccattataggtggaaaatggaaacttttgattatacgtaatttaaaagaacgtccctggcgttttaatgaactgcagagagatattgaaggcatttcacagaaggtactgacagatagtctcaggcaaatgattgatgacgggcttgtttatcggcacgattatcaggagattccgccaaaagtagaatatggattaacggaacttggaaaagaaatgctgccaattatagatgcactggccgattttgggaattattataaatcaatcatagattgattctttattaggaatttaaacaacatagaaatcagaatttttttatgaagtttccaatattaatttatacaggagatattatgaaaattacttacattaaccacagtggatttttacttgaaaccaaagattgctactatatttttgattattataagggtgaattaccgcaccttgataaggaaaaagaagtaatcgttttttgtagtcacttccataaggatcattttaaccctcaaatttttgagattcttgatgatatggggatgacttatcaggcagtcctggcgaatgatatacgaaaaagaaatcatttgacagatatgaagattacatatgtttatcatgatcagacttataatctggataatgataccaaagttgatacattgctgtctaacgatagtggtgtagcatttattgtcaaaacaaaggaaggtaccatttatcatgccggcgacttaaatgactggtattgggatggcgagccgaaagctgataaccagagacttacttcagcatatcgtgcagaaatcaggaaaattaagggtatgcattttgatgcagcatttgttcctttagatccgaggcagggagatcactatgccgacggaattctgtatttccttaaaaatgtagattgcaatgtcatttttccaatgcattactggaatgatgccaatgtaattaagcggtttattactgaatatccgcaatataagtcacgtattaaagacacagaatgtacaaaaggagaagaattatttgacataagaaaaaagaaatgctattctaataaatagaaaggtgctactgatgacggttcgcctgatgaaaaaatgtttgattaaaaataaccgctcatgttttgcaaggacgatgggcggttatttttgcgtcttggaatcatgctttccacgcacgtaatcaagactataaaaagtcgcacacagtgagatcactgcaatcaggtcagtaatggtcagcataggctaattctccttttcaagatttctcaaaagagacattctttgttcatacagaaatttaattaggaaacagaggtaacccaaaatgtgctaattttagataacaaaaaaataagagaaatccttgaactaaggatttctcttacattctatcaatgcggaagaggagacttgaactcccacaggataaaactcccactagaacctgaatctagcgcgtctgccattccgccacttccgctcgacacaaattatcttatcatagagcgaatagtttgtaaagcctaaaaattaaattctatatattgtttgaataattccaatttatcagaaaattttaataaagtttttattgactccgtgatggatttgtattatagtttctcgttgatattttgaagaaaaataacagtgggaggaagagatatatgacattttatcaggaattacagcttagttcagttgcatctaagcagctgatcaaagcgacagaagacaagaaggaaaggtatcgccacattcttatttataattttaaagtctatcttgtaatggcattttgtgtggcggtagtttctttatatagtcatttcacagggaataacaacagtgtagtaggcgttacagtgcttcttgcggtgcttgttcttcgacaggcagattttgggattcgtacaacgcacggattggcctccatcgtcggaatctttggaatattgattgcaggaccgaagctttcgaacatggtgtcaccgattccggcattctttattaatatagtatgtattttgcttcttatgattctgggatgtcacaatgtgatcatgtataatcattctacatttgttcttggatatcttcttctccagggatatgatgtgaccggacaggagtacttgtatcgcgtggctggccttttggttggaatggtattgtgtatggcaatcttctataagaatcagaagaacagaccgtatagaagatcatttcttgatttgttccgcgagttcaatattaactccgcaagaaacagatggtacattcgtctttcattagttgtttccagtgcaatgttattcatgtcattgcttggacttccgagagcaatgtgggcggggatcgcaagcatgtctgtttgtcttccattcccggatgactgtaaagaacgagcaggaaagagagctgcatttaatatagtaggatgtctgttatttgttatcctgtatttggtgcttccggagtcaatgtatccatacatcggaatgatcggaggaattggagtcggatattctgcagggtatgcatggcagacagcatttaatacatttggtgcattgtcgattgcatccggcttgttcggaatgccgtatgcggtagcgcttcgtattggggcaaatgtatttggcgcggcatacacgatggcatgcaataagattctgccgagactggcagcagtgtttgagcagagaagagaacaggttagtgaataatctaagttgtttgaaatagtaatttattcgaatgaaaatggagtgagaactgaggcaatataatttacctcagtatctcactccatttttcgtacaaacgatccagtgaccaggcggcattggccgggctggtggaaggaagcacaaggatgtctctttcggtcagcggctgctgatatttcttataaagagctccggctttatttccatttgcatagatttgtcgaatctgacaatgatctaagatttgtttcaaatcagttggtgtcacattcttgatactgctgtcactggagcctttgatgtcacagctttgaataacatcccagatggcgatatggtggcggagcaacatggccgttttctcttcaactgtctgcggagtttcctcctcacaaagttttgccaacaatttccagaatcgattttgtttatgtccgtagtagaaattattttcccgtgattttacagaaggaagagttccaagaatcagaatcttggagtcttcattatatattggttcaaaggaatgggtaatgtgttcatattccatggttgtgctcactttctgatggtttggagtaagttttataacaagtatagtgtcttgaggagattgtgtcaatgatactgtttgcgttgctggtcgcaaaccgtgtgaacagtaactgctacaaagcgcaacgtcgcatttacacaaaggttgcttttacctgcgtaatggattatactagtctgacagggaattttgaaacggaggattttacaatgaaaattgcagtaacttatgacaacggaaatattttccagcattttggaaagacagagactttcaaagtgtatgaagtggaagataataaggtggtttccagtgaagtgatcggttctaatggggaaggacacggagcattggcaggactgcttgcaggacagaacgtagatgttctgatctgtggtggaatcggtggcggagctcagacagcacttgcagaggccggtgttgaattatgttcaggagcacagggagatgcagatcaggcagtagaggcatacctgaaaggcgagcttacatccaaaggagctacttgtgatcatcatcaccatgaggaaggacattcctgtggagatcatgaagagggacattcttgtggaagcagctgcggtggcggatgcggatcacacactacaatggaaggaaagaatgttggaaagaaatgccgtacacattacaaaggaacattcaatgatggaactcagtttgattcttcttatgaccgtggagagccgcttgagttcgtatgtggtgcaggacagatgatcaaaggatttgatgcagcagtagctgatatggaagttggtcaggtagtggacatccatttgatgccggaagaagcttatggaatgccgaatccggaagctatcttcacagtagagattgcagaactcccgggatctgaagaccttgaagtgggacagcaggtttacctgtccaatcagtatggacagccatttccggtaaaggtaacagctaaggaagagacaacaatcactttcgatgcaaaccatgagatggcaggaaaagaactgaacttcaagattgagcttgtatcagtagaataaaaagtaaatagaagtaattagaaattccagtaagaaatatctaataagaaacataaagagagggcagtgcttcaacgattgagaaatcgtgaagtactgccctctctctgtaattgcaggtaaagatttaaattgctacggatttacactatcactcacaatctttccatccataatgcggacaacacgatcaacctgattagcaatttcatcatcatgtgtaatgataataactgttcttccagactcatgaagatctttcagaatattcatgatctcgatagtcgacttactgtccaggttaccggtcggctcatcggcaaggatgatcggcggctgtgcggcaattgctctggctacagcgacacgttgctgctgtccaccggaaagctggttcggtctgtgatccatacgattttccagtccaactttcgatagagcttccccggcaatctcttttctttgctgctttccaagtccgcgatagatcagtgggagttctacatttccaagtgcattcaagtttggaatcaaattaaatccctgaaagatgaagccgatcttgtgattgcggatatcagacagttcattgtctgagagattggcaacatcttttccgtccagaaaatattccccggaatcaggtgtgtcaagacagccgagcatattcataaatgtagatttaccagaaccggaatgtccgacaatggcaataaattccccctggttgatctcaagagaaacatcatccagtgcgcggacttcattttctccaggattgtagatcttgtacatatttttaacacgaatgagtggctccataataacctccttaaaaaataaaataaataactcaataagaactctaatttccaaaataagcattgagtccaagaaccagaccatcagccagactatttagtgtggaatcactgtggtcagagcttgcatttccaagttccatatcaacagacggaattgtactataagaagtctgtgtcagatcaatattcatagaaccattttggtaaatggtcattccttctgtacgaagtccttctacaagagagaccccaagtgcatcatgttcctgccagtgggaagcgacaggttccatacttttcagaccatccggcacagaaatgtagaaacagcctttgtcatatcccaatccatctccatcccagtggagtgagatgtgacagtcagctacattgttacagagtacggtgcgggcaacgttatcaagctggacatcgttgctatttctcaccataaggacatcatatccttgagcaagcagcttttctttcagaatctgagccatctgaagtgtaacagtgctttcagcagttccatcgttaaatgtcattccaccggaaactgcagtcgcataagttgcaccctgagcagtgcttccgccggttgtctttggagaaccatccgggtgacactgtgtctttacagaagcaccaccggaagttccatgtccggcattcacgccaacgacgatatccttgcggtcagaatctgcaagataaatagtagctgttccagaattgattgcagaaaagtctgcgtattgccaggaagggtcaaagctgatctcctgtccattgctgtaaagagccgctgcgccggtcagcgattcctgctgagttacggattcagattcagaagcagatggggtggcggcatcagcagaagaagtttcatctacagtttcattttcagaatctgatgagatagaaaaatcatccgctgtcttgggtggtgccttagtaccctgcgcctgcgccgtgtccgtactggatttgtgctgtatgctaccgcatccggtcaggcagcaacacaggagaacggcacaagagaatcgaaaaaatgggtttttcaatttcaatctcctttatgataaatattactgttctcattgtatcataatcattttccaaatagggaaaattcagataaaattaaggtttcaaaaaggaaaatataatgtaaaaaattcaaggcgattgcataatcattttgattgcgatagactacaagagaaagaatatcatagttagggaattttgcctgccaatagcatatagtgtggcgggagttctagtgctacgcaatttgcataatcataatatacgaggacaatatatatggaagaacaacaagaaaaaacgcaagggaaaaaacaagataaaaaattgtggaagattttctggtcaaccttttacttaagcgcgttcacatttggtggaggttatgtgatcgtcagcctgatgaagaaaaagttcgtagatgaatatcattggattgaggaagaagaaatgttggatcttgtggcgatcgcgcagtcggcaccgggagcaatcgcagtgaacggagcaatcgtgattgggtataaactggctggaattgcggggattctgacagcaattgccgggacagtaatcccaccatttcttattatatcgatactttctgccggttatcaggcatttcgaagtaaccagatcatcagcttaatgctcgaaggaatgcaggccggagtgggcgccgtgatcgcatctgtgacatatgacatgggtgccggaatcgtgaagaagaaagatgctttgtcatacgtacttatggtcggggcatttatagcttcctgcatatttgaggtaaatgtagtctatgtgattctgatctgtggaattgtcggagtactccgcgcattaattgagaaaaagatcacgaagaaaggaagtgaagagaaatgatttatttgaaattgtttttaagctttcttcagattggaatgttcagctttggcggcggttatgcggcgatgcctctgatccaagaacaggttgtgacacagcatggttggcttacgatgacagaattcacagatttgatcacgatttcccagatgacacctgggccaattgcgatcaatgcggcaacatttgtcggcagcaagattgcgggagttccgggatctgttgcggcgacctgtgggtgcattctgccgtcttgtattatcgtaactttgatcgcatggttttatttaagatataagaaaatgaaaatgttccagagcgtgctggaatccctaagaccggcagttgttgcattgatcgcatccgcaggaatcgcaattctgcacactgcattctggacagatggaattgtgcagtttgcggcgacaaaatggtctatggtggtgatctttggaatctgtctgttattgcttcgtaagacaaaactgaatccggtggttgtgatgatgcttgccggagtgatgaacgtggcagtaagatatgcagccggataaaatagcgaatccatgcaggttccggtaaaaaaatgtgaataggtgaaaaatatgcagacttatgtggaaaacatttcaaagttcatggtatattgtgaataactttcatggtatactgtacatacgttgtaaagataagaacaggagagcgaaatgagcgaacagaacaatcagaacacacaggaatcacagacaccgcacaagcgtcgtgtgagatataaaggaaaatacccgaagaaattcgaggagaaatataaagagttacagccggagaaatacaaggatacaattgcgcatgtaatccagaagggaaacactcctgccggaatgcacatttccatcatggtaaatgagattcttgatttcttgaagattcagccgggggagacaggattcgatgcgacactcggatatggtggacatacaaaagcaatgctggaatgtctgaacggtgaggggcacatctatgcaacagatgttgacccggaagagtctgcaaagacaagaaaacgtctggcagatcagggattcggagaagacattttaagtatccgtctgcagaatttctgcacgatcgatgagattgcaaaagaagttggaggatttgattttatccttgcggaccttggagtttcctctatgcagatcgacaatccgaagagaggattttctttcaaagttgacggaccgctggatctgcgactgaaccaggagaagggaatcagcgcagcagagcgccttgataacatttccgaggaagagcttgccggaatgctttacgagaattcagatgagccatactgcgaagagctggcgaaagcgatcacaacagagatccgcaagggcaatcgcattgatacaacaacaaagcttagaaatgtcatcgagaagactttagatttccttccgaataataaagaaaagaaggacattatcaagaagacttgccaaagaacattccaggcacttcgtattgatgtcaataatgagttcgaagtgctttatgaatttatggagaaactcccgggagcattaaaaccgggcggaagagtagcaattcttacattccattccggagaggacaagcttgtaaaaaaagcactcaaagcaggatacaaagaaggaatctattccgaatatgcaagggatgttgtacgtccgtcagcgcaggaatgtgcacagaacggaagggcaagatctacgaagatgcgctgggccgtgaaggcggaatagttgacttcaatataatgaaatgttatagttagtcagaaataatagcgttcggtgctgtttgatcagagaatatatttccatatcctgattgaaacaggtaaaagggaaacaggtgtaagacctgtacgaactcgtcactgtgagcagagatgcggtcttcttagaaattagatttcagaagaccgctcctatacagacaagtgtggagagtccgcacatccactgggagaccgggaaggtgttctgtatagaagatctgtaagtcaggaaacctgccggccgttggtgcggggaatatacgaattccagatcacgagtaattgattgtaccgaaagaaccattcttactgttcgcattacgtgtgaccagcaatcattcatttgattcaagataattctatccattttccgtattttataattcacaacttaagaggagacaaaaaagaaatgaaaaataagagcagatggcttgcgcttatgctgacaggttctatggtgatttcaccattgtcttatacaagaacatatgcggcagaaaatgagcagcagtgtgagacaaatttacaagaaactgtagaggtggaagaagctgatctagataagaaacaagatgagagtcagacagaagacgcaggaaatgttaaagaagataaaagaaatgacgatttaacaaaagaagatcagacagaggaatctgataaagttgataattcttcggataaatcagataatcagaattcaatcgaagcagaaacaaaaccaaatttagagaataactcagaaaataattcagaaaataactcagaagagaaagatacagaaaccaccgggaaaaatccaggcataactgtctcagatcaggttgcggacaaaaaaactgataacaaggatacacagataaaagatgaaacaggcaagtcagaaccttctacagattctaacgattctatgaatactccggaaccggaacttccgccactgcaggaggctccttctgtaactggagaatatgtgaaagtagtaaaagaagatgctgaagagttcaagatgttcaaggtcagtaaatcaacagttgttgaaaaggatggcgaacttgatattacgatcaagacaaacaacacaggatttgatgcgctatatcttggttcaaaagatgacttgttgaaagcagctgttatagaaggaacaaaggatgaagaaggtgcatggacatttcattttaatgtgccgaaagaaaaagcaggtcagacaattccggtatctttgagaaagtcaaaagatcagacctggtatgacaaacagtacttatggatgtacattccgaatccgggagaaacctcaacaccggatccggttccaaatccgaatccagcaccggaagcaacagtagcaaacggaatctacagtatggacgtaacttccagttcttccatgtttaaagtagtggattgtatcctgacagcaaaagacggaaaaatgagcgccgtgcttacattaagcggaaccggttacggctatctgtacatgggaacaaaggaagaggctgcaagcgcagagcagtcatcctggattccatatcaggtgaataaagaaggaaaatatacttataccgttccggtagaagcgttggataaggaaatcgcagtagcagcctattctattaaaaaaggaatctggtatgacagaacactgacattccagtcagagacaatgaagaagattgccgatcttaattctacagattctgagaataaaggtgattccggaaacaacggaaacacaggaaattccggaactactggtggttccaacaatacaggtaatacaggaacaaacaattctgctttcccaggcggttctgtatctggaactaattcaggaaaaacagatggaaatgacggaaaagcagataatgtatcaaaatacgaatccgatacaagtggttctacttctcatgtagacagtggaacaacactgaaagacggtgtatacactccggatcgttttacctggtccggtggaacaggtaaggttcagattacttgtaataaagtgacgatccagaatggacaggcttatgcaacactcgtgttcagcagtgatcattatcagtatgtgaaagcgaacggaaataagtattacacaacaaagggcggcggatcagcgacagctgttatcccggttgcattgaatcagaacaataagattattggaatgacagataaaatgtctgtcgcacatgagatagaatatacgattttcatttatcttgcagcggcgaatggaggaacatctgcaaacggaacagatgcttcaacaagcagtaaccagaagctggatgaacaagcacctgaaattataggtttggaatatcagtcagaaacaaagcttgactatgcagaatatttcaagatttatcattatgatcaggggattgtacttcttgaaatcgatatgacgaaggacacagcaagagacccggaaaaagcagaggaaacaaagtctgaaaatgagaagtctgcagaagataaagagaagtcttccaagaagaaagtagcttctgttacgatcaatagatcagaagattctaagaactcagatgcagaaagcaaagtagatgcttctgccgaggaatccgcagcttcggataacaacggcacaagcgaacaggaactggcagcagagctttacaagggaaatgttgtgaaatatctgatcgttccggaggatgtggaagttccggttggtcttgagcaggatatgatcattgtgaagaaacctgtggatcatacttatgcagagtctgatgagattctgaatacgatgaaagatctcgatcttcttgataatattgcggcagttggaatgaagagcaaagactgtacagtatctgagattgctgataagatgaaagcaaaagacggagagaagaatgctgaagttgcatatgcaggaacagcggacaagttgaaactgaagaattttgtgaagagtgaagtgaatcttgcattgtttacaggagatattcttccaagagaagattctgaggaaaatgcagcgaaagatactgacaaaatagcagataaagacagtaaagatacaaaagagactctgacagtagaagagaagacggaacagttcgaagagctgacagaaaagcttgcaatgcttggtattccggtttttgttgatcgttcttccgaggaaaagacagaacttggaaagcaggagtggatcaaggtttacggtgttctctacggatgtgaagagctgacgaacgagaagtttgatgcggcagtagcagcggcagagaaataggagagaaaaatagaatgaagataagaagatgcagaatcacagcgttaatgctttcagctgcacttctgctcggaggctgcggttctaccgcagcctccggtggaaacagcggtaataattcagcaggtacagatgtaacaaaggataagaccaaagatgcagccgacaagacaaaaaaagcaccggaaatcgaagggcttacctatgaatctacaatggatctgacttacgcgacagaattcgatgtatactattataaggatggatataagttgatcgatgtccatgaagataagcaatatctgatcgttccggaaggtgaagaagaaccggaaaatctggcggatgatattgttgtgatccagcagccgacagagaatatttatatggcggcgacagcatccatgtctctgtttgatgcaatcggcggaattgacaaggtgaaattctccgggcttgaggcttccggctggtatgtagagagtgcaaaggaagcaatggaatccggagcgatgacatttgcgggaaaatacagcgaaccggattatgagactctcgttgacggagactgtgatctggcaatcgaatcaacgatgatccttcatacaccgaaagtacaggaaatgatcgaagatcttgggattccggtatttgtagattactccagttatgagtcacatccgcttggaagaaccgagtggatcaagctttatggggcgcttctgaataaagaggaagaagcggatacattttttgaccagcaggctcatgtaatcgaggaactgaaaggcttcgagaacacggaaaagacggttgcttatttctatgtgagtacggatggttcaatcgttgtgagaaaatctgacgattatattccgtcaatgattgaaatcgcaggtggaagatatgcgttcaaagatctgaagaatccggacagtaacgcaccatctgttaaactgacgatggaggaattctatgcgactgctgtagatgcagattatctgatctacaacgggacgatcgacggacaggtaaatagtatcagtgagttggaagcaaagaatgaattgttctctgaattcaaggcggtgaaagacggaaatgtctggtataccggaaagaacttatatcaggcaacagacacagtcggagagctgatcaaagatatgcatctgatgctgacagacggtgatgcatctcagatgacatttcttgaaaagatggagtagaagaatggagcagacaagttttcatcaggaaaatttcagacggcgtacaagatacacagcggtatttctgattcttgcagcagtattttgtgttgtgacagtgctaaatattaataccggaaatgttcatattccggtgcctaagattttgcgcattctctttctgaaagaaggagcggcgacagagtacaatattatatggaagatccgtcttccgagaattctgatggcagcgctgcttggtggtgcattgtctctttcaggctttttgctgcagacatttttttctaatcctattgccggacctttcgttctcggaatttcttccggagcgaaaatggtcgtggcacttacaatgatcgtgtatttgaaatatatcggaagattttcttcgtatacactgattcttgcagcatttatcgggtcgctgatctcgacgggatttatccttctgatgtcgaaaaaagtgcagcatatggcgtctcttcttgtcggggggatcatgatcggatatatctgttcggctatcacggattttgttgtgacatttgcggatgattctgatattgtgaatctgcacggatggtcacagggaagtttttccggaatgagctggagcaatattcgtgtggcagcagtggttgtcggacttgcggtgctgtttacatttttcctgtccaaaccaatcagtgcatatcaattgggagaagcatatgcgcagagtatgggagtcaacatcaagacatttcgcgtgattttgatcttgctttccagtattctgtcagcgtgtgtgactgcgtttgccggaccgatttccttcgtgggaatcgcagtaccgtttcttgcaaggaaagcatttggaacgtcaaaaccgatcgtggtcataccgggaacgttctttatgggagctgtgttctgtatgatctgtgatttgatcgcacgaatggcactggcaccggtggaattgaatatcagtacggtgacttctattctgggtgcaccgatcgttatctatatgatgataccgaagggaggaagaaaataagatggtagattattattttcaaatgaaagacctgtcggtaggttataatggaagctccctgatccgtgatattaatatcgggatcaacaagggggagatcgtgactttaatcgggccgaatggttcaggaaagtcaacgattttgaaaagtattacaagacagctgaaagtcgttggaggaaatgtattttttgacgatacttctcttctgaaactgccgtacaaagagcttgcgtctaagatggcggtcgtgttgacggatcggatcaagacagagttgatgacttgtcatgatattgtggcgactggacgttatccttacacaggacgacttgggattctgacgcaggaagatgaatgtctggtggaagaggcgatgcaggcggtgcatgcgcaggaactcggcaaccgtgattttaatgcgattagtgacggacagaagcagcgcgttctgctggcgagagcaatctgtcaggacccggatgtgatcgttttagatgagccgacttcattcctggatgtaaaatataagttggagctgttgtctatccttgagcggatggcaaggcagaagaagattacggtgattatgtctcttcatgaaatcgatctggcacagaagatttcagataagatcatctgtgtcaaaggcgagacgatttcacattacggaagtccggaagaagtatttacagaagaaatcattcgcgaattgtatggaatcaataatggatattttgacccgctttttggaagtattgaacttcctgcgccggagggtgagccggaagtgttcgtgatctcttccggcggaactggaatcccggtttatcgaagacttcagaaggagcacatcccgtttgcggcaggtattttatatgaaaatgatatggattaccggctggcaagattacttgcggcagaagtgatcacggaagaaccgtttgaggagattcgggaagaaacgcttcagaaagcatttgagacaatagggaaatgtaagcgtgtgatcaatgccggagtgaagatcggaacatggaatatagggattgagagattgcttgaaagagcagaaatagaaggaaaattataaaaacgtataaaaatgagccgagatagcattttaaatgtgttttaaaaagcgctgtcaacgctcttttttgttgctattcatgattgtgaatggtagaatagaacagtataggctataaaatagatgggaaaatagcagtacagactgttatgtgatgggaggcaatttatgagtaacaatggacaatcagcaaagagagcaagcttctcgggtaaaatcggatatgtgcttgctgttgcaggctcagcagtcggcctgggaaatatctggagattcccgtatctggctgcgaaatatggagggggaatcttccttctcgtttatctggttctgaccgtatcttttggatatgttctgatcatgtcagagacagcacttggaagaatgacaagaaaaagtccggttggagcttttcagacatttggtaagacaaaatcatttaagatcggcggatggctcaatgcaataatcccaatgctgatcgtgccgtattatagttcgatcggtggctgggttatcaagtaccttgcagagtatttgaaaggaaatgtgcagactgttgcacaggacggatattttacagaatttatttcagattcttttcaggtagaagcatggttcatcgtgttttctattcttgtattctgcgttatcctggcaggagttgagaatggtatagagcgagtatctaagattatgatgccaatccttgttatccttgcggttatcgtagcaatttattctgtaacaagaccgggagcaattgaaggtgtgaagtatttcctgattccgaatccaaagcacttctcagcaatgacggttgttgcggcaatgggacagatgttctactccctgtcaatcgcgatgggaattttgtatacatatggttcttatattggtaaagacgttgatcttgagaagagtacaacacaggttgagattttcgatacagcaatcgcaatgctcgcaggacttatgatcattccggctgtatttgcattctctggtggaaacccggacaatctgcaggcaggaccatctctgatgttcatcacacttccgaaggtattcgcaagtatgggcgttggaaggctggctggtatcctgttcttcatattggtacttcttgcagcagtgacaagtgcaatctcacttctggagacaagcgtatctacattccaggatgaacttcactggagcagaccgaaatgctgtatccttatggttgctgttatgcttataatcggaaccttatcttctatgggatatggagtactgagctttattcagattttcggaatggcatgtctggacttctttgacttcctgacaaattcagtgatgatgccacttgcagcacttgcaacatgcttcttgatcgttcgtaccgttggatttgacaagattgcaagggagattgagcagtcatctgcatttaagagaaagaaattatacatgttctttatgaaatatctggcaccgatctgcctgattattatattattaagttctattgcaaatgtattgggaattatttctatgtaatggaaaatgcttgttaaaatagacaagtaatcttgctgtaaatctacctgcatggtataatatgactagacttgtaaagtttagaaacagttcagccatacaacgaagtggtcataaactgacggtcttacgttgtatggctgaattgcaataattttacattttaagaaaataataggagtgattaagatgtatcaggaagagtataagcgctggatggcagcagacctggaagacgcagatctgatgccggagttaactaaaatcgagggaaatgatgacgagatcaaggagcgtttcgcagttgcgctgaagtttggaacagccggacttcgtggtgtacttggagcaggaacaaacagaatgaatatctatgttgttcgtcaggctacacagggactcgctaactgggtaaagacacagggcggtacacagacagtagcgatcagctacgacagccgactcaagagtgatgtgtttgcgaagacagcagcaggagttcttgcagcgaatggaattaaagtaagaatctacgatgctctgatgccagtaccggcactttcctttgcaacacgctattataactgtaacgcaggtgttatggtaacagcatcccacaacccggcgaagtataacggatataaggcatacggaccggatggatgtcagatgacagatgatgcagcagcaatcgtatacgaagagatccagaagacagatgtacttacaggtgcgaagtatatgtcttttgctcagggagttgaagaaggtctgatccgtttcgtaggagatgactgtaaggatggactgtatgaggcaatcgagtcccgtcaggttcgtccgggtctgtgcaagagtgcaggactgaagcttgtatacagcccactgaatggatctggattagtaccggtaacacgtgtacttaaagacatcggaatcacagatgtaacaatcgtaccagagcaggagtacccgaatggatatttcacaacatgcagctacccgaacccagagatctttgcagcacttgagctgggactgaatcttgcgaaagagacaggcgcagacctcatgcttgcaacagacccagatgcagaccgtgtaggaatcgctatgaagtgcccggacggatcctatgagcttgtttcaggaaatgaagtcggagttcttcttcttgactacatcgcagcaggacgtatcgagaaaggcacaatgcctgagaaaccggtagcagtgaaatctctcgtatctacaccacttgcagatgcagttgcagagcattacggagtagaacttcgcaacgtactgacaggattcaagtggatcggagatcagattgcgaacctcgaggcagcaggagaagttgaccgttttatcttcggatttgaagagagctacggataccttgcaggaccttatgtacgtgataaagatgcaatcatcggatctatgctgatctgtgagatggccgcttactatagaagtatcggaagttcactgaaacagagactggaagagatctacgcacagtacggacgttatctcaacaagatcgatagctttgaattcccgggactgagcggaatggataagatgtcaggaatcatggaaaatcttcgtaagaatcctctggaagagatcgcaggatacaaagtagccagcgtgatcgattacgagaagacagaagaaacaggacttccgaaggctaacgtacttgtttacaaactggagaacaacgagacagtaatcgttcgtccatcaggaacagagccgaagatcaagatctactacacaacacttggtaaagatcttgcagaggcagaagctgagaaagagaagcttgcagaagcattgaaacctattatggagtaatagaagatgggaaaggggatcagatatctggtctcctttttcactgtcgtaaaaaaataagtagtaaatgtgtagcatatatgttaaaatcaatacattacagtaaagtaataaagtgattagagaacgaaacagatggaggaatattacgatgtatataacatgtcttgatgtagagggagtacttgtaccggagatttggattgcattcgcagaggcgagtggaattccggaactcaagaagacaacaagagacgaacctgactatgataaattgatgaattggagacttggaattctgagagagcatggtctcggactgaaagagatccaggagacaatcgcaaagatcgatccgcttccgggagcgagagagttcttagatgagctccgcacattcagtcaggtaatcctgatcagtgatacatttacacagtttgccacaccgctgatggagaagctgggctggccgacactgttctgcaacagtctggaagtagctgaggacggcgagattacaggattcaagatgcgcgtagagcagtctaaactgagtactgtgaaagcactgcagtctatcggattcgacacgatcgcaagcggagattcctacaatgaccttggcatgatccaggcaagtaaggcaggattcttgttccgcagcacagagcagatcaaagcagatcatccggaacttccggcatatgagacttatgatgagcttctgacagcaattaaagacgcgatgaaatagaggatgaaaatacgaaaaagcatctgcacagcctgaattggccggttgcagatgtttttttatatgttaggaaagttctttcctaacatataaaaaaacgctccgcttaggatgcgcactgcggcgtacaaggtaggcgtcgcaagcgaccgccgcaggcgcaagaatgtgccgagcacattctttgttctatatagattaatgtagaaaatcatgataagatagaaagacaaagaagtattagcagaatcagcagtatagaaaaatggaatctgtaagattggatgaataaacaggaaaggactacaaccaacatgttatacgatgaaatcatgaagatagtgacactggcaggggaactgatgcttcaggcacaggacgaggaactgacagtttttgataaagaaggaactgcaaactttgtgacaaagcatgacaaggagattcagttttatctgatccagaatttgcgtcaactcataccggaagcgacatttcttgcagaggaagacgggatgcagcaggaacttggagatggctattgtttcattatagatccgattgacggaacgacgaactttatctttgattacaagcacagttgtatctcagtcggtctgacaaagtttggaagaatgctgtttggctgtgtttacaacccttacacaagagaaatgtattccgctgtgaaaggcgaaggggcgaagctgaacggaaaagagattcactgttcggataaaggacttgcagataatctggttgcattcggaactgcacggtatcagacagaagatacagacagaatctttgaccatgcgaagaagctgtatctgaacagccttggaattcgtgcaggtggttctgcagcgcttgatatctgccgtgtggcatccggcgcaaatggagtctatcttgaactaatgctgtatccgtgggattatgcggcagcatcactgatcgtgatggaagcaggaggatttatctcaacagcagagggcggaatgatcacgttggatcagccgtgttccatcctggcagcaggacggcagtgctggaaggaagcaagtcagctgttgagtgaatgatcagaagaatggaatagagagaaaaaatagaaaggaactgaattcatatgtttacgcatgagatgataaagtcgtttaatcagttggagatggatgtatataattacattatcggcaatgaagagaaagtagtatatatgaaagtacgtgaactggcagaggaggttcatgtttcgacaacaacgatccttcgcttttgtaaaaaggtaggatgcgagggatattctgaattccgtttgaaattaaaacaggaagtcaacagcaaagaacagaagaaaatcaatatggatcttactgcggttaaagatttctttgagagggtgcagacacaggcatttgctgagaatatctaggaagctgtgaagttgcttacaaaggcatcgtcaattatatttgtaggtgtgggaaattcttctattataggaaagtatggggcaagatattttaataatgtaggctggttttcatttgctattgatgatccgttcacgccagtatttcgtggaaaaggtgagagaacagctacaatcgcattgtctgtatcaggagagacggaacagacactgatgttggcagaaaagttgaaaagaagagggagcagcctgatatctattacaaataaggcaaactgttctttggcgaagatgagtgactgcaatataaattattatgtttcagagtataaaaaagacgaaaattatgatctgacatcccaaatggcagtcgtttttattttggaattaatcggaagagaattggagggcgtccataacgatacagatgatctgtttcaaaatgatatggaagacttatttcattaaggttgtagaatgtaatggtacgaatagtaaccagataagtaacaaaaaaaacaggatacaagaaaaagtatcataatatacaaaaaaggaaagtgaaaacagtgcattttacacaataaagtagaatgccctgttttttttatgtaacaaattccgtctatatggaacggaaaccagaaacaggaaaaagtactgacaaaatggaaaatgcctgttatactagcaccatcaaaacaaatgagaaaaaattagggaggaaacaatcatggtaattcgattattttgtgcagcaggaatgtcaacaagtcttttggtaaaaaagatggaagaggcagcaaaggaaaaaggaaaagatgctgacatcgcagcatatccatttacagatatggaacgcatgattgaaggcgcggatgtagcactgctcggaccacaggtaggatatcagcttgccagagcaaaagagatctgtgatccaaaaggggttccggtagatgtgatcccaatgcaggattatggaatgtgcaatggaatgaatgttttgaaatttgcatataagcttgcgaaaaataaataagagaaaacaaagatacacaatttaaagtaaagggtagtagcaaatgaaagagaaatttaacgaaaaagtaatccctgtgatccttaagtttattaatacaaagggaatacagtcaataaaaaatggtatggtgacttccatgtctcctctgatcatcggatcaatcttcctgatcctgtcaaactttccggtaaaggcagttgtcgatgtattagagtctacaggaatcaaagcagtattagatcaggcatgtggcgcaacattctccatcagtgcgatgatcgcagttatcggtatcagctatagctatgcgaaactggaaaatcaggaaccactcaactgtgcaattatttcattggcatcattcttgattctgatgccttcgtccaaaacaacagaaagtggagaagttgttggtggaatcattgataagacatggacagcaggacagggaatgattggagcaatcattgtcggattgatcgtaccgcttgtttactgttggttcttgaagaaaaatatacgtattaaaatgccggccggagttccggaaggtgtaacaaatgcattctcagcattaatcccggcattcgtaatcctgacagggactgcagtaattcacggtatctgttctattggattcaacacaacaggtatggaaattatttacaaagttgttcagacaccacttcagaaaatgacagactcccttggtggagcagttctgatgtgctttacaggaccattcctgtgcttcttcggagttcatggttcaacagtagttggtggaatcatgacaggacttttacaggcaaacagccttgcaaaccaggctattattgacagtggtgtagaacttacaatagcaaacggaggccatattgtaacacagcagttttatgatcagtttatcaatataacaggtgcaggtatcacaatcggacttgtaatgtatatgttcttctttgcaaaatcaaaacagttgaaagcacttggtaaagtgggaattattccggcaatatttggaatcaatgagccagttctgtttggtactccgatcgttatgaacccaatgcttgcaattccgtttattggaatgcctgtgattgcatgtttaatccagtattttgcactgtatacaggaatctgcccattatatggagcaacacagattccatggacttgtccaccgattatctcaggattccttttagcaggatggaaaagtgatttgcttcagttagtaatcctttgtgtttcattctttgtttatctgccattcattaagaaggttgacaagatgaatctggttcaggagaagaatcagccagtagaagatgaggatgaagactggtaaaatcagaatttaaaaataataaaagcaggacaggagacaaaaatggacgaaaaatttgaattggcatgttttcagattattacatatgtaggtacagcaagaacacattttatcaatgcaatccattgtgcgaaagagggaaaatacgatgaggcagcagagctgatcaaacaaggagatgaagccttttcacttgggcataacgctcatgcagaccttctgacaatggatgcaaatggagagatttctaatggatacatgcttctgatgcatgcagaagatcagcttatgagtgcagagagtttccgtattctcgcagatgaattcattgcactgtataagagaattgatgagaaataatcatcaagatgtaattgaatatagaaacagaaaagttgggggcaaaagcccccaacactattatacaaatcatgtaactgttcagagccaaccttcaaaatgctacgcattttgaaagtgtggcgtatccgccaaataaaatttcaaaaacagttttaaaaatgcaagcattttacatctttttttgaaattttgcttggctctgaacagttaccaaattaataaagacaacaggaaggaaataacaatgggatttcgaaaagattttctctggggcggcgcagtttctgctcatcagctggagggtgcctatgatcgagatggaaaaggcttgagcattatggacgttgtaaccagcggagatgtaaatagaagaagaagaataacaggtgaaatactaaaaggcgagaattatccgaatcatgaagcaatcgatttttatgattactataaagaagatatccacttatttgcggaaatgggattcaagtgtttccgtacaagtattgcatggacacgtatcttcccaaatggcgatgaagaacagccgaatgaagccggattaaagttctatgatgacatgtttgatgagtgtctgaaatatgggatcgaaccagtgatcacactgagtcattttgagatgcctctgcatcttgtacaagagtacggtggatggagaaacagaaaactgattgatttcttcgtgaaatttgcagtaacatgctttgagcgatacaaagacaaagtaaaatattggatgacatttaatgagattaacaaccaggcagatatcggtgacggattcatgctttacgctgattccgggattgtagttaaaccagaagaaaatgtagaagaattgatgtatcaggcatctcactacgaactggttgccagtgccgaagcgataaaagcaggacataagatcaatccggaatttcagattggctgcatgatcgcaatgtgcccgatttatccggctacctgccgtccggaagatatactgcaggctgaaaaagccatgcagaaaagatattattatacagatgtgcatgtaaaaggagaataccctgtaaatattttgaaatactgggaaagaaaagaccttaagattgacgtaacagaagaagatcttgcagtgttaaaacagggctgtgtcgattatatcggtttcagttattatatgtctttctgtacaaaagcagaaccggacaatccggaatatgattaccgtggagaaaaggatcgtataaagaaccagtatgtaaaggcaagtgaatggggatggcagattgatccgattggactgcgctattcattgaactggtttacagatcgctacaaagtaccattgtttattgtagaaaatggatttggagcatatgatactttagaagaggatggaagcatccacgatccataccgtgtagaatatctgcagcaccacatttcagaaatgaaaaaggcggtagaggaagatggtgtagatctgatgggttatacaccatggggatgcatcgaccttgtcagtgcaggaagcggtgagatggataagagatatggattcatctatgtggataaacataacgatggaacaggagacttgtccagaagaaagaaagattctttcgagtggtataaagaagttatttcaaccaacggtgaaaatattaattagatgacaggatgattgttaaaaaagagtgtctatatcaagaaacgataaaaggttctgatatagacactttttgcacgtggattcaaaaaagaagagattcgacattacggatttgcatttgaaggaaagaaaattctgatcgggacgcgagaataatgttacaaaacatggtaaaaaatgcggaaaaatgttacaagaacaggtgaaaaacatggaaaaaagtaacgaaacacattgaataaccttggaaaaatgttacaatactaatatcaggaggttggaacaatgttaaaaagagaaatctcagagaaattaatttcgtggaagaatcagaagaaaaagaaagcactttgtatcattggagcaagacagatcggaaagacaacgattatccgagagtttgcgaaagagcagtacgaatactttgttgaaataaatttcatcttagacaaaggggcagaaaaaatctttgaaggcaaattagatgcgaatacgattattgagaatctcacagcgtttaagatgcagaaattagaaccggggaagactctgattttcctcgatgagatacaggaatgtccgaatgcaagatgtgcaataaaattccttgtggaagacggtagatttgattatatagaatcaggatctcttctgggagttcgatacaaggaagttccatcttatgcggtaggatttgaagaaatcgtatatatgtatccgatgaatttcaaagaatatcttacagcgaatggagtacaggaatctacgttaaaaacgttacagacctgttatgaaaaacatgaagcggttccaaaggtgatgcatgaaactttgttgaagctgttttcaacctatattgttgtggggggaatgccggatgttgtacaaacttatgtaactacacatgatgttggaaaagtaatacaacttcagagaagcatcctggaattatacagacaggatatatcaaaatattcggaaagcacagaaaagataaaaatcaaagcaatctttgacagtattgctttacagttagatgataagaacaggcgatttttcctgaatcggattgatgaaaatggaagaatgaaccggtatgagaatgcattcctttggctgagtgacgcaggcgttgcacttccatcatataatgtgacagagccgcagccgcctctgcagcttaacgagaaacgaaatctgttcaagctattcatgggagatacaggacttctgtgtgcttcctgtatggagaatattcaatttgaactcttacagggaaatatggaagtaaatatgggaagcattttggaaaatgtatttgcccagataataaaagcaaatggattctctttaaattattttgagtctaaaaaatatggagaattggatttcgtgattcaaaatggaatgaaagtagatcttctggaaataaaatcaggaaatgattatcagaaacattcggcattgaataaagtgtctgctgtagagaactgggattttggaagaaagattgtattctgtaaaggaaatgtgatggagaaggaaggaatcgagtattacccttggtatctgagtatgttttatcagccggagaaagaaccggagagatttatctatgaggtggatctggcgggattgtaggacgcagtaggatacagaaacataggatacataggatacagaaacctaggtattcattgactgaaaagtacttctgggttatacttttaagagatacattggttggggaaattagaaccaatatacaatgcttaaaagaaaagagaggcgagaagtaggtatgttttcatttttcaagaaaaaacaggctcctgcagaagagaataagccattcgttgtaaaggcttatctgtcaggaaaagtagtaccaatcgaggaagtaaaagacgaggtgttctcatctaaagcattaggtgacggacttgcaatcgagccagaagagaatgtgatcgtggcgccatgtgacgcaacagtatctgtgctgatggaaggctccagacacgcagtcggacttacacttgcgaacggagtagagattttgatccatgaaggaatcgacactgtgaacatggaaggtgacggattcgagtacttcgtaaaagaaggagataaggtaaacgcaggagacaagctgctttcatttgatccggagaaaatcaaagaacacggatatgagaaaacatgtattctcgtagttacaaacggagacgattatccggatatgaagctgcatacaggaatggacgcagtacagggcgagacagtgatcgctgaattttaatattgactttatgaagattgaccgctgagaatggagcagagttttgaaaccgttctcggtggtctttcttttttgtaaaggcgaaacgtttcacctttacaaaagtagaaaatttataatataactcagagtggcagtgctgatagctgaatagaaatacaggataaggagaataaaaggaaaaaataatacaaaatacataatctatttctagacaaaacataataatgcgtctaaaatacgaaaaaatgataaaaaaactcgagaaaataggtaaaaattactaaaatgcaattgacagatagaatatctgtgtactataatctgcttgacgtaaaaagaagactaaagtcttagatttgaacgaaccgtttcatgaagagaaacaggaaatcaagacaaaggagtcaatgatgtatgaagaacgatttgaagcatctaagaagaagcgaattgatcgatttgatctatgagatgaagaagcgggagatagagcttcagaccaggctggatgaggcagaggcaaagcttcaggccagagagatcacgatagagaaggcgggatcgatcgctgatgcggcagtacagctaagtggcgtattccaggcggcacaggaagctgctgatagctatcttaaatcgataaaagcaaaggaaaaagaattggcacgcctgacaaagcaggccaagaagaatatgcgagattagagtagtgaagaagaaagaacattcagttaatatccctacaatagaagaagttgagaacgaacagaagaggctgagacaccgggcggtatatcaaagaacactccgcggtacgatcgcagtgctgcttgtagttgcggcaatctctgttcttgtggcaaccctgtggatgccggttctgcagatttacggttcttccatgtcaccgacattggaagccgggcagattgtagtatcagtgaagaccagtcagctgaagacaggagaaattgttgcattctggcaggggaataagctcctgatcaagcgcgtgatcgcaggtccgggacagtgggttgatattgatatggacggaaatgtgacggttgacggacagacactggacgaaccgtatctgacagaaaaagcgcttggaaattgcgatattgatctcccacatcaggtatcagaagcacattggtttctgatgggagataacagagatacatcggttgattcaagaagcaccgcgatcggtgatatttcaaaagaccagatagaaggacagatcatatttcgaatctggccgttgaataaaataggaagcatacagtgaaataatagtaactgttcagagccaacctccaaaatgctacgcatttcggaggtgtggcgtatccgccaaataaaatttcaaaaacggtctaaaaaatgcaagcattttaaaccttttttgaaattttgcttggctctgaacagttacaaataataaataattagtttagtatataaggtatcgaagggaagactaacacaagaaggcagcagatacacaccagaaaaaagaaggtggatttgtgcagaataaaggaacggattatatcagaagattattaaaagacaaaacccggttaaaacggtggagaaagatgattctgtgtctgtcctgtgtagttgttttctgtacggtctatgcgctgattctcccggcaatcacgctggagagaaagacagtctgtggtcaggaagagcatagccatacagaagaatgctattcaagtgacggacagctgacttgcggaaaaacagaacacacacataccgaatcgtgttatgcagatgataagacattggaagatcaatcaggggaagatccacagcagacaccggagcagaaccagacagaaggacaggagcagaattcgggacaaagtcaggaacagaatcaaaatcagagccaggatcagagtcaaagtcaggatcaggttcagacatcgggtgattggaatgtagctcagaacggagaaaatggagatacagcaggaaccacagcggatgagacatctggcaatgatgaagaaagtgtcgtggcagggagtacatcagcaccagcagcagagggcgaagacggaacgggaggtactacgacggcgacggaagggtttgatctgagtaagtatgcatcaaaggtggaatcagtttcactgtattatcaagaaaaagatgaaaactggaagaaaattgaagaaaacggaagcgaagaaattccaggtgatgcaaacatcaaattggaagttgagtataaggagatacagatacaaaaactgattcaaaaccataactgtacattgacatatgatcttccagatcttttacgtaatgcgacaccaggtggaaacattatggaaggatcggagattgttggaacactttctataagtgaggggaaaatcaaagtacaatttgatcaaaactatcttgagaagaaaaataacgaaggagttacaacaattgaaggagatttctatattacaggagaggtgaatctgagtcaattggacaaagatggcaaaaaaacactgacaactgctgggaaaacatataagttggattttggacaagatgcaattgcgaagtacggaaaggttagtgtacagaagaactgcacaagtgagaaggctatttcaacaacagaaggaaattttctttcttatactattacagttacagcaggggaggacggatgcccggacgtttcagtagtagatagtttgataagtaattctgattgtgttacttatgtaggaattacatcaaatgcgacggagcttgcggcaacttcaaatgaacaaaaaccatatgaaacgattggttctgctaagaattctgggaaaatttacaaaggaaatgcaccgactgcagaaaagcctattccgacagaaggagaaacaagtattacagaacctggaagcttggtctggaagattggtgatatggcaccaaatgaaagacggacacttacatactatgtgaagttgaaagatgatgttgctttggacaataaggaaattaaaaatcaggcaaatgtatactcaaagacatataagagggtatatgatgatgcaacatttacaccgaagatttcttacaccatgccgaaaagccgagtgggaaatattgaaaagaacacggatggatcttacatcattaattatgagcttcatttttcattggataaaacaaatagtaattatccattggaaaattttgtgtttcaagattatctgaaacacagtagtaatgcaacagattcaaaagcacttccatatatcagttatgatcgtacttcggttcgtgtgcttgtgaaaacggatggggcgactgactacaatgagattcctaaaactgaatataataccagctggtcaacagacatgagtacgtataaaacagagtggtcagattcttcggatggaaatccaaatagttttaaaatttccggaaaggaaggtaaaccgattcaagtgaatcttggcgactcctattatgtaacgtatagtgttaaggtgaagccagaggcattagcggcggtaaaatcagataatgtatctgtgaaaaatcgttggattgcatcagcatctaatgtatatagtcaatttgtaactgggtttaatgcatacaacagtaataataatgtcggtggttacaaatgggacgagaaagtagttggaactggaacaacagctgatcagacaatcgaaatgaccggcgataaatacgatctgacaagtggagagattctgttagatacttcagcgggcgccagttttactgtcccggcaggaagttatccttatacagttgatgtcaaccagacgttaggagactgggatgcgacgaatgtattaatgaaggatacactagattctgataagatgcagtatacaggatatgcgaaagtagaagcatatagttatgatacaacaacgaaagcatatgagttacaaggaactaagtgggtgaagattgacggattaaagacctttgaattgaaaccatcagatttaggatggagcggacagaattatgcatatagatttacatattatgcaaagccggtaaatacgggtacatttagcacagctatcgtaaataataaattcgagttatcaggggaggttatcagaggaggtcagaagtttgatattacaggcattaattctcaaaaagaggtaacaatctctggtgagtacaggatgaatgtaaacaaagaatcctggtattatgagaaaccagaagctagtgcgacagaatggacaaaaggaaaaatttactgggcgattgaagtttctggaacagcgattaaagaaggcacatatttcaaagattctattgtaagcggatctgatctgacaaattcgattttaaaaacggattcgctggcaggaatttataaaggtacgttaccagagggaaagacacttacaggttatagtagcttgaaggatctgcaggataacggaaaccttactgatgtcacagagaaatttgagaaatctggtcagaatgaaagcaaattacaagtaaaggcaaaagagcagattgcgcttgggcaggagaaactttatatcattgtaagaacggaaccggcagcgttgccagtaaaagatagggattataatacatatagaaacagtatcagtacgagtgataatggtaaaacttggatcaaacagggagaagcaaacgaactgctttgtggagccggagatatcttaaaagagtttggacagagctttacctatgatggaactactgtaataagtaaaaatgatggccgggatgaaggagactcgggaaaaatagcaaaagatgcattgcctggggcagggcagtatgcttcctgggtattcaagttgaactatgccggtgaattgtcaggaacctatcgtgtgttagagacgattccagatgggatggaacttgcatatatccgtattaaatggaccggaacaaagcagggaacaattgaatcaaaggaagttacgaatcttgagagtgatggatggaaaaagaaaacggttacagcaggtacagataacaacagaagtgaaacaacaacttattatgtcaaagataacaaggcattaatcgagctgggagattttgtaaatggaaaaatcagggatgattattccgtggatgttcaggtcgtatgcaaggtgacagatccaaaagtgctgttgggaggagaaacaaagagatttacaaatcaggttacacttcagacaacagatggccaggatattaatacagcaacctctccagctgatataacagcacagaaaattgataagtcaatggctgcaaccaatccggtaagcgaaaaagtaaactttataatcaaggcaaatcagttgggacagacgcttccaacggtagaaggaacaactctgaaactgattgataaaatgagttctactttgatcttggatacaacaacgattaaggtggttaattcaaaagacagtaaaccagttgctttcaaagcttcacttggagaagacaatacgttgacaattgagattccttgtaatgtaccgattacaattacctacacagcaagggttaatgcaccgcctagacaaagcgtgaatttttcaaataaggcatattgggaaacttatactccgtccagtgggacaagtgtagatcagaaaaattattcatacactgcaggaggaacggtcggaagtggaaagaatatctggttgaaaattatcaagaaagatcagaacaacctgtctcttggattacaaggtgctgtattccaactgaagaaatgtacgaaaaacgatgacggaacgataaaggtagacaatgataagaattgggagaataaaacaactgattcaaacggagaaattcaatttggtgctggaacatccgatgatccagcaatggactataatacgctttatcaggtgatggaagtaacagcaccaaatggatatgttaaagatgataccccacattatattatggttccaaagaaagaggatggagcagcggattactcggattatgtgaaaagctgtatagcagatcctaagattaacatacagtatcagccaatatatgaattgaccattagtaatcataaaggtgagattaccgtagagaaaaagtttaagaatccgggtggtcatgattcaaatccagtgagtggaacgtattgggttggcctttatggagatgaaaatgcaacaggtactccgattcagaaaataccaatcacgtatagtgccggagaaacggggacaaacaagaataaatttgttgatctggatacgaaaacgacctattacgtatttgaacttgatgataagaatcagccaataaaagattcttctacagttgctattgtgaacggaatggaatactttacgtcatatacgacaacaaagactggcgcaacagagtcgaacagtgcaaccaacggtgacacggtaaccgttacaaatcaaagccgtgtgaataaactgccttccacaggcagttgtggggttcttatttacagattggcaggggtgatattaatactcttcgcaggagtgcttatgctgatgaaatataaagaaacaaaaacaagaaactaacaaaagagagtgtgctgcacccccggaaaattccgggggcagtaacaaaaataaggaggaagaaaatgaaaataatcaagaagattgccgccataatgctctcggttatgatggtattgggaatgtgtagtgtggtaggagctgaggggacgagtgaaacgtcagcaacgaaggatggaaagataacaattacgaatgctgtgccaaagcagaaatatacaatttatcagattttggaactggagagttttagtgataaaacagcagaaaatccaggaaactatgcttataaagcaacaactaagtggaaggggtttgttgagtcagaaacaggagagacatatttaaaaacagatggtagcggatatgttacatgggtggaaaatgcagatcctgtagcgttcgcaaaagcggcattggcttatgcaaaagacccaacaaattcaatagtagcagaaaaatctgcaaatgctccagatgctacagagggaagcactacttcaacggtaacatttgagggcctttcacttggatattatcttgttgattctagtgttggagctctttgctctcttaataccacagctaaagaggtggaaattcaagaaaagaatggtgtgccttcagtggagaaaaaggtacaggaagattctgatgatcattgggacaaggataacacagcagatattggtcagacagtaaacttccagacaacaattactgcacaagcaggagcacagaactatgtgttgcatgataagatggataaagggttaacatttaataatgatataaatgtaaagaaaaacggatcagttgtagatacatcaaattatacattaaatgcaaatattacagatggttgcacatttgaaatcgttttcgcacaggaattctgtgataaattaaatgcgaacgatacaattatcgttacctattccgcaacattaaatgagaatgcagtaattggagaaacaggaaataccaatgaggcaaagttagagtatggagataaaaatacaatttcttcaaaaacaataacaaaaacatataaaattccagtattcaaatatacaaagaagaacggaacaaatgaaggacttgcaggtgcaatttttacgttgagtaaaaattcaaatggggaaaatccaattgaattagtaaaaattacagaaactgaggatatttaccgtgtggcaaaggaaacagaagcagcgggaattacaaagataacaaaagtgacaacccctgaaaatggtagttttacaatcataggacttgatgctgacacatactatctcacagagacaaaacagccagatggatacaacaagctgtcaaatcctgtaaagatagtcattgcggcggacggaaaaattaccattggagataaaacagttgaccaagtagaagtcgaaaacaaatccggttccctcctcccatccacaggtggaatgggaacaaccttgttctatattttcggtgcaatccttgtaattggatctggagttgtactgattacaaagaagagaatgaaataattgttgctcgattataggtatgtaagtgagataagaaagaagtaattttgctgtacggggaatgtgtttcatcattccccatacagcagcaaggagaggattgtaacatgagaaagcatatttcaacaataattgcgggaatcatctttcttacaggcttgtccttactgctgtatccgacaattagtaatttctggaattcgaagcatcagacgcaggcggttgcggattattcgaagcagatagagaagatggatgatcaggagaaggagcaggcgctggcggcggcagaggagtacaaccagacgttgattacgaatggaggacgctttacaccatcagaagaggaagatactttatatgatagtcttctggatgcaaatggaaccggaatgatgggatatatcacaatcccagagattcgctgtaagcttccgatatatcatggtgtagaggattctgttctgcaggttggtatcgggcatattgaaggttcgtctcttccggttggaggaaggggcacgcactgtgtattatccgggcacagaggactgccgagtgcgaagttgttcacagaccttgataagttggaaaagggagatatctttcttctacacatttatgataaggtattgacgtatgagattgaccagatcagtattgtcgagccggaagattatggcctgcttgagattgaagatggaaaggatctgtgtacgcttcttacatgtacaccatatggaatcaatacgcagagacttttggtgcgcggacatcggattgaaaatcgttcgggagatgactccagagtgacatcggatgcggctgaggtaagcagtttgacagttgcggtatgtgttgcgattccgcttttaatcattagttttcttgtagtggatctatcaatccggcgttcaagaaagaaacagaaaaagtagaggaagataaatgttactgttcactcccgtgtcaatcactccgctgattgacacggaggatgcgtgttttgacttgaatgcatctcgccccatcgccaaaggcgatttaaaatggcgagatgcgttgctggtcgcacatcgtgtgaacagtaacagataaattgatcagtgggagggagaacatgcgaagtccaaagaaaagaatccgccacagagacaggaattatatgatatatgtgttgacatttctcattgcgctgaccgggatactcggaatctcaaagggcaatccggttctggcagcggaagaagagagtacgcagaaggggagcatctcgctcgtctgcccggttgaggggatggagctgtctctgtaccgtgtggcagagtatgaggagtcgggcagttttacattgacggaacaattccagaagtatccggtctcactggagcagaagagccaggagggctggcaggggacagcggatgcgctggcggactatatcagacgtgatggaatcacagcagatgcagtactcatatcagggtcggacagaaccgtatgttttacagatcttaactggggactttatcttgtgctgggacagacaacagagctgcaggaagacggcaagacacagatctatgagccacagacagcattgatcgcattgccggaggattcaaaggaaacttcagaagggacagatccttatcaggtgacagcggttctgaagttcgagaagaacgacaaaccgggaaatccagaagagacgaagattcatgtattgaaagtgtggaagcaggatcaggagaaagaacgcccggattctatcgtggtagaactgctgcagacggatgtggaggggaatacaacagtcgttgaccgtcagacacttacgaaagaaaaccagtggtcctatacatggaagaatctttccacgttgatgcgctggagtgtgtcagaggcagaggtgccgaatgggtatacagttgctgttacgcgtgaaggggatacagttgtcttgacgaatacagcaaagaagtcaggaaatcctgacggagaagtgaatccaccatcgaagaagccgacggataaaacagtaaataaaacaacagacaaaacatcagacaagcttccacagacaggacagctctggtggccggtacttgtgcttttgtttgcaggtgcgatctgtctgctggtgggaagagttttacgggatagaaaagaagagaagaatcgatgagcaagaagaaaaagaatcagataggaaagatatttacaatcacagggttgctgcttttcgcggcagcccttgctctttctgtatacaatctctgggatggttatcgggcagagcaaagcagagaggagctattggaagaatatagagacaagaaccagaacatttctgatgagggagagcaggcagaagaatctgacgaacagataccggattaccagctgaatccggagatggagatgccggagatcgcattagaagatctggacggcgcggcgtgcatcggagtgcttgagataccaaagatcgacctgaagcttccggtattgagcgaatggagctatccgcttctgaagaaggcaccttgccgttattcaggaagtgcttatctggataaccttgtgatcgcagcacataattatagaacacatttcggaaagttgaaagaacttgagacaggtgatgaggtgatcttcacagatgcagccgggaatcggttcgaatacaaagtggcggcggtagaggcactgactccacaaagcgtggaagatatgacaagcggagaatgggcgttgagcttgttcacttgtacgctggatggaaagaacagagtgacggtgcggtgcgaggtttccggtcgcacatcgtgtgagcggtaacgaggagtaaaagatttgtttgacataagaaaaaagaaatgctagtctaataaatagaaaggtgctaccgatgacggttcgcctgatattttatagggttaaaaataaccgcagagtttctcaggctgggcggttatttttgcgtcttggaatcatgctttccacgcacgtaaccaagactataaaaagtcgcacacagtgaaaacactgcaataaggtcagtaatggtcagcataggccaattctcctctccaagatttctcaaatgagagatgatctatgtaatcggagctataaactctccgcgcaaagcgaaccgccattcacgtcaatgtgaagtagcaccccaggcataaagcctgaacatgcgataacaaatatgttgagaaaaatcaacataaaaagtaacacatataatgcgaaaattattgcagttaaccccattattttcctgatttatgcaacaaattgcaggagacggttattttattgaccgtctcttttttgtgtgatataacctaatcatagcaaacaacaaacgtttgcatagaaagaaatgaacaatgcgcattgttaggaaacattaaaaatcatgttatctcatacaagaaaaaggagacaataaaaatggcaaaagtaaaaacattcaagacaattttccctgcagtatcagtaccgcttaacgatgactattctatcaacgaaccagaattcagagcatacttaagatggatcaaaacattctacggaaaaggaatggacggacttgtatgtaacggacatacaggagagatcacaggacttacaagagcagagagaaaacgtgttgtagagatctgtgcagaagagtgtggagacgttatgacaatcatctccggtgttaactgtgagaacacagcagagtctatcgagatggcaaaagaagcgaaggaagcaggagctgacggaatccttcttatgccaccacatatgtggctgagattcggtatgaacccggatgcaccgttcgagtatgtaaaagatgttgcagagggagctgacatcgacatcatcatccacctgtacccggcaacaagcaaagctttctacccggtagagacactgatcaaaatgtgcaaagagatcgatcatgtaaaatgtatcaagatgggaacacgtgttacatctatctatgagcatgacgtacgtcttcttcgtcaggagtgcccagacatctctcttatcacatgtcatgatgagacactgtgcgtaagctggttcccgggaatggacggagctctgattggattcgcaggatgcgtaccggagatcatctgcccggcaagagaagtatttgcgaacccagacaaacatacattaaaagaagctcaggattggtcagatcgtatctaccacatttcccaggcaatttatggaggcggacagccatcaggtgaagctcatgcaagactgaaagaagctctgaaacagagaggaatcttctcttcagcacttatgagaaaaccagttcttccgctgaacgatgaagagaaagcatgggtagctctcggtcttgagagaagccagcttccggaagtagacatgacacagttcgaagactaagaaacatactgcaataattctgccatgttattataagataaaatatgccttttagaggaggctgccgctttaacaataaaattgcgaagcggcagcttcctttttgcctttttcgttaaaattatctttttaaactaattttttagtctttatgcggtttgttgtgtaaatacacaataaattgcatgaaaatggcagatgaattggatttatgcaacaaattgcaggagaggtctgattcgttgactgggtgttgcattgtgtgatataacctaaacatagcaaacaacaaacgtttgtaatatgaaaaatgaacaatgcgcaaagttctggcaattgataataatgagattcggaagaaaaaggagacaataaaaatggcaaaagtaaaaacattcaagacaattttcccagcagtatctgtaccgcttaatgacgattattctatcaacgaaccagaattcagagcatacttaagatggatcaaaacattctacggaaaaggaatggacggacttgtatgtaacggacatacaggagagattacagggcttacaagagcagagagaaaacgtgttgtagagatctgtgcagaagagtgtggagacgttatgacaatcatctccggtgttaactgtgagaacacagcagagtctatcgagatggcaaaagaagctaaggaagcaggagctgacggaatccttcttatgccaccacatatgtggctgagattcggtatgaacccggatgcaccgttcgagtatgtaaaagatgttgcagagggagctgacatcgacatcatcatccacctgtacccggcaacaagcaaagctttctacccggtagagacactgatcaaaatgtgcaaagagatcgatcatgtaaaatgtatcaagatgggaacacgtgttacatctatctatgagcatgacgtacgtcttcttcgtcaggagtgcccagacatctctcttatcacatgtcatgatgagacactgtgcgtaagctggttcccgggaatggacggagctctgattggattcgcaggatgcgtaccggagatcatctgcccggcaagagaagtatttgctaacccagacaaacatacattaaaagaagctcaggattggtcagatcgtatctaccacatttcccaggcaatctacggaggcggacagccatcaggtgaagcgcatgcaagactgaaagaagctctgaaacagagaggaatcttctcttcagcacttatgagaaaaccggttcttccgctgaatcaggaagaaaaagactgggtagctcttggacttgagagaagccagcttccggaagttgatatgactcagttcgaagataaataagacgaaaattatgatataactatagatgtggtgtctgaaatatatacgaaaaaatcatgtttcagacatcactcttagaacggaggagccatgacagaaaataacaaaaatctgggaatagatggatttgatccatcaaaagtcaacaagctttctgcaaaagaaattttaaaacgtgtaggtcctggaattgtccttaccggagtagtaataggacctggtaatattacaacatctgcaatgattggtgcgaattatggatacagcctggtctggctgattataccgatcctgatcatgggtgttacattcatgctgacatcctaccgtatttctatgttgacaggaatgccaatcttacatgcgatcagacattattatggaaaagttgcatctggattctgtggtgttgcattattcttatcctgcctgttctttacacttggaaatatttccggaacaggtgcaggtatgaaccttgtatttggaatcaactggaaattaggagcactgatcatgttggcagtacttacagtgctttacttttcaaaaggtgtttattcaaaagtagaaaaaggaattttagtttgtatcattgctatgatatttgctttctatgcaacactgattgcaaccggcggacctgactggggtgcaatgggacatggattaacacactggagtgtaccggaaggaagtcttacaacagcacttgcttatatcagtacaaatgcagctgtgacagcaggaatctatggaacatatctcggtgctgagaaaaagtggaaaaaagaggatttatttaacggagcaatgaaatgggatgcaatcgcacatattgtatcagttatcctgatttccggagcaatcatgctggttggagcaatcgttctgaatccacagggaattcagattaaagcaccggcacagttggcagcgcttcttgttcctttccttggaaaagcttctaacattgtaatgggagttgcacttctcggagcaggattctcttcacttctcggtaatacgcagagaggtatggtacttttaagtgcaggattcgacaaagacgttgcacttgagtccaagctgatccgctggggatgtatgatcacacttgcatttgcatgtgtagtctgcttcatctacgacggttctccgacacagctgatcttcattgctaacatcgcaacatcaatcgcaactccggttgcaggtcttttcatcacattgatgttctggaagaaagaagttcaggctggattgaaggcaccaagagtactgcaggttcttatgacagtcagttatctctttacattagcaatgacagtctctgcacttgcaaattatattccgaagctgattgcttcattttcataaagatcaggaagtatgtgtccgcttctacggtcttatagataagaacgaaaagtctggtgattatcataacgagatggttgccaggcttttgtggcatgttataataggaagagtgataattaattgtacgagacagaacagatgcacaggaggaagagatgttatggctacattaaaggatgttgcaaagcttgcgaacgtagatgtgagtacggtatctagagcattgaacaatacgtcgtatgttcatccggatacgaaaaagaaaatatttaaggcggtagagcagttaagctatcgcccaaatctgctggcgaaaggtttgaaacaggggaagagacggacgcttggagtagttgtaccatctgtgaatctttctatttttggtgagatcgtccaggggatcgagatgcaggcaggcaataggggttacagtctgatgatctgtttgacgaaggatgacccagatattgaagcagagtgtctgaaccgtctgcgcaatggactggtagacggaatcctgatcgcatcgaccggacagaacacaagattgattcgtgatatcaaggcaaatggagtagcagtcgtgcagcttgtcagaaaccaggacagaaaattcagttcggtagaagctgactgcttctcctgcggatatgaagcggcaaagtatctttataagaaagggtgtacaaagattggttttatcaacggatcgacagagtttacaccatatgcggaacgttacagaggatatcataaagcaatgaaagaactcagcctgaaggagtatcaggttgagtccggactgccgcgtggaaattatttcaaagatggttataaaggcgtagagcggctcaaagaggcatttgatgacgtagatggaatcatggtcgctgcggatatgcagggaatcggagtactccgggcactgaaagagagcggaaagaaagtgccggaggaggtcaaggtcatcagccttaccggtcatgtaatcggaggaatgcttgagacagccatgacttctatggagctgccgggtcgcgagatgggacagcgggcagcggatatgatattagaagatattgaggcggcagatgatgagaaaccaagcgtacagcacatggtgttcggtacgaaactgattgagcgagagacgacatagaaaaagattcccaaatgggaatctttttttgaaaataaaaaataaactccgaaaggagaatattttttgattatttacatctccgatcgatattgtataataaaaaatgtagaaaaatattaaaacatagttgacagatgggttttataagtatataatacaaaccatcaaaaacacaccaactaagtaggttaataaagaaagtgaggatatagactatggcggcaatttataaaggcacacttggactgattggaaacacaccacttgttgaacctgtgaatctggaaaaagagcttggacttgaagcaacgattcttgtaaagcttgagtatcttaatccggcaggaagtgtgaaagatcgtgttgcgaaggcaatgatcgaagatgcagaagagaaaggaatcctgaaagaaggttctgttatcatcgaacctacttccggaaacacaggaatcggacttgcatcaatcgcagcagcgaaggggtacagagcaattcttaccatgccagagaccatgagtgttgagcgaagaaatatcctcaaagcatatggagcagagatcgtacttacagaaggtacaaagggaatgaaaggagcaattgcaaaagctgaagagcttgcaaaggaaatcccgaacagctttatcccgggacagttcgttaatccggcgaactcaaaagcacacagagagacaacaggcccggagatctggaaagacacagatggaaatgttgatatctttatcgccggtgtcggtacaggtggaacactgacaggtgttggtgaatatctgaagtcccagaaaccggatgtgaaggttgtagcacttgagcctgcagcatccccggtactttcagaaggaaagggcggaccgcacaagattcagggaatcggagcaggattcgtaccggatgtccttaatacaaagatctatgacgagatatacaaagcagacaatgacgaaggattcgcagccgcgaagcttcttgcaaagacagaaggaatcctggtaggtatttcttcaggagcagcactttccggagcaattgcatatgcaaagaaaccggagaacaagggcaagacaatcgtagcacttcttccggacagcggagacagatactactctacaccactctttacagagtaggcacgaatatcaagacaaccgcaaggcattaattaagtaagattttaacttccaagcagctctggctgcggaataagaatacaaaacaggaattagaaaaaggagaataaacccatggcaaaattagagagaaaagacagaaaatttaaatttgagacattacagcttcacgtaggccaggagcagccggatccggtgacagatgcaagagcagtaccgatctaccagacttcttcttatgtgttccgcaacagccagcatgcagcagaccgttttggactgaaagacgcaggaaatatttacggacgtctgacaaacccgacagaggatgtgtttgagaagagaatcgcagcgcttgaaggaggtacagcagcacttgcagtagcatccggagcagcagcaatcacatatacaattgagaatttggctcagcagggagatcacatcgtatctgcaaagaatatttatggaggatctttcaatcttcttgagcatacacttccgaattatggaattacaacaacatttgttgacattttcaatctggaagaagttgagaatgcaatccaggagaatacaaaagctgtttacatcgagacacttggtaatccgaactcagatgtagttgatattgaagcaatcgcaaatatcgcacataagcataaaatcccgcttgttgtagataatacatttgcaacaccttatcttgtaagaccaatcgagtatggtgctgacattgttgttcactctgctacaaagttcatcggtggacatggaacaacaatcggtggagttatcatcgagggcggtaagttcgactgggaggcttcaggaaaattcccgtcactgacagatccgaacccaagctaccacggcatcagctttacaaaggcttgcggaccggctgcatttgttacaaagatcagagcaatccttttgagagatacaggagcaacaatttctccgatcagttcctttatcttcctgcagggacttgagacactttcccttcgtgtagagcgtcatgtggaaaatgcactgaaggttgttgagtatctgaacaatcatccacaggttgagagagtacatcatccatctgtagatccggatccgaagcagcaggaactttataagaaatatttcccgaacggcggtggttctatcttcacatttgagatcaaaggtgattctaagaaagctcaggatttcattgataacctggaactgttctcattgcttgcaaatgtagcggatgtgaaatcacttgttatccacccggcaacaacaacacacagccagtgcacggaggaagagcttctcgatcagggaatcaagccaaacacaatccgtctgtccatcggtacagagaatattgatgatatcatccaggatctggatgaggcattcaaagcaattcagtaaataagaatcagagaaaacagaaaaatctgtaagaagtaggagcagtaaaagctgctcctatagtgtttagaagaaaggagtagaagcgtttgaaattatcaaagaaaagtagatatggactgcgtgctcttattgatctggcggtgaattcacggacagagctggtttcattagggagtatcgcacagagaaatgacatttccgcccagtatcttgagcatgtattttcagctcttcgcaaggctcatattgtaaagagtatgaaaggttcccagggaggatattttcttgagagagatccgaaagaaatcacggttgcacagattgtagaggcactggaaggaacgtatgacctggaagatgaagttgatcgaaatagcgtgggacgtggagatcaggaagcaattcagcatctgatcattgaccgaatcaatgattgtgttcaggagattctggaagatgtgacgcttaaggatcttgtggatgcatacgaagggtatcaggattctgttgagggaatgtactatatttaatagagtggaacgtaaggagcagagacagacagcatggcagaaaattatcaatttgaaacacgatgtattcacggggacggaggatttgtagagggacatccatacggagcagtctccgttcccatttttcagacagcaaccttcgcacacccgggaatcggaaaaagcacaggatatgattattcccgcgagagcaatccaacacggtatgaattagaaagcgtaatgtcctctttagaaggagcggatgacagtattgcatgctcgacaggaatggcggcaattggaatctgcctggagcttttcggagaaggagatcatattttatgtacagaagatctgtacggcggaactgtgcgaatgtttgaaagcattggcgaaaagcgaggattaaagttttcttatgtagatacttcagatattgatcttgtaagaaagaatatcagaaaagagacaaaggcactttatattgagacaccaagcaatccaacgatgaggattacagattttgcagagatgagaaaactcgcagacgaatttgggttactgattcttgcggataatacattcctttctccttatttccagaaaccgctacagttgggtgctgatatcgtagtacatagcgggacaaaattccttggaggacacaatgatgttctcgcaggatttgtttgtgtcaaagggaaagagctgtcggaaaaattgcgttatacatataagacagttggctgtagtctgtctccgtttgacagtttccttgtacttcgcggaatcaaaactttatcagtgcgtctggagcgccagcaggagaatgcgaagaaaatcgcactttggctgaaaaacagaccggatgtgacagaagtttattatccggggctggaagatcatccgggatacgaggtaaaccagaagcaggcgacaggagcaggaagtatgctttctttccgtgtagatacggtggaacgtacaagaaagattcttgaaagtgtgaaattgatttcttatgcggagagccttggcggtgtagaatcattgatcacatatccaatgcttcagacacacggtgatgtaccggtggagataagagaacatcttggaatcacagaagatttccttagaatgtccgttggaattgaaaatgctgaagatctgatcaaggatctggaacaggcatttcaataaaaggagtaaaaatgagtgagaagaatttgaattttgaccagcctgtagagagaagaggaacccacagtctgaagtatgattttgcagaagaaagagggagaaagaaagatattcttccgttgtgggtcgctgatatggattttaagacgtcatctttcgtccagaaagcattgatccgtcaggcagagcatggaatttatggatatacagagtcagatcaggagtattacgatgcggtcagctcctggatggaacgccgtcacggatggaaaatcgacaaggagtggatcacaaagactccgggaattgtctttgcactggcaatggcggtgaaggcttatacagaacctggggattatattctgatccaggatccggtctattatccattccgggaagtgattgaaagcaatgaccgtaaagtggccgccaatatccttatccgtaaggaagatgggtcttatgcgattgatttcgaagattttgaacgccagatcgtggaaaagggtgtgaaattattcttattctgcagcccacacaacccggtcagccgggtatggacaagggaagaagtggagcgtctgggagacatttgcctaaagcatcaggtgatcattgtaagtgatgagattcatgcagacttcgtatttgaagggaagcatcaggtacttgtagatcttaaggacgagtataaagacattacagtgacatgtacttccccggggaagacattcaatcttgctggacttcagatttccaatattatcattccaaatgcaagccttcgcaaggaatttcagcatcaggtaactgcagccgggtatagtcaggtcggcgcacccggaatctttgcgctgatcgctgcgtatactcagggcgaagaatggtatcaggcgatgaaacagtatgtgaagtcgaatattgatttccttcatacatggatggcagaacatttaccacagatcaaggtgacaaagacagaaggaacctatctcgtctggatggatttccgggcattagggctttcagacaaggaactaaaagaactgatagaagataaggcagaggtttggctggatggaggagcgatcttcggagagcctggaagtggttttgagcggatcaacgtggcttgccagagagcgacgcttgtggaagcgttggatcggattgaaaaagcagtgaaagaaaacgttcacggatgattagataaaatagaaacagaaaaagatggataagcaataaaagtattacttatccatctttttctatgtagatctgattttccattgtattgaaacaactgttatttcgttccccctgaaataatgctatttctcaattttgcatggaatggccggttcatgaaagtcagcaagtgtgatacttccaagataatcctcgataaggttatccagtttttcccaaatcggacgtgtcggacactgacccgcacgtgcacattccggtgcatgatcctccagacacgctacagctgcaaggcttccttctgtcgcatgaagaatggaagcgagagtgtattcttccggagattttgtcaggcggtagccaccaccttttccgcgaagtccaaggataaatccttgtgtgacaagagattttaaaatattttccaaatacttttcagaaatctcctgacgtgctgcgatctctttcagcggtgtgtaagagtccggatcctgctgagacagatcaatcatgactcggagagcataacgccctcttgtagagataatcataacctatttcctcccaagttacctataattttacattgtgaatagtgtatcatatgttaagaaaataaacaagctgtcgaggtaaagtgaaacagtgcaaaagcattaaagtttgttgaaaacaaacgaaaacgagtgtgtctaaaaatgaaataaccgtgaaattgtattaactttactggaatttacagtgcgtttgtgatactctaaagactgtaagtcctgatcggaatgctatctttctgatcagatagaaaagactgggttactgttcactcccgtgtcaatcacttcgctgattgacacggagtgaacagtaacaagactggagagagaatatgaaaagattagtagtagcattacttctggcaagcacattgtgtatgacaggatgcggcgatacgaagaaaacagaaccggctgcatctacgacagaagaggtggacaaagcaagcagtacgatgaaagaacagatgggagacaacgcggttcttccaagtgattctgttaagagagttatggcaaagcagtggaaggtgattggaacagatactgtgtatgatctgaaagaagatggaacaggaactaaggatgacgccggactgacatttgagtgtggatttgatgaggataacaacattacaatcaagatcacaatggacggcgaagacgaaggtaaactgtatgcggttacgacagatgatacaggctatggcgtagtgctggagtccctggatggtggtaaggatataaaattactccaggcggatacagaacttctggatctgacggatgaccgtgcgaaggggctgatcggaaagtggacagacaacagcggaaatgaatataaattaaagaaggacggaaagcttgtgatcaagagttcctccggtgaaacaaagggaacatattgtgttgcagagaatgcagacggtacattgaggctgaatctggttatctccggtggaacactggaatatgtctatacactgtcagatgatggatctacagtggaattatgtagtccgggaacagatacggtacataagtggacgaaagcctaaagtgtggtgaataaaagagatgcagtttgcgcatgaattgatcgttccggaagttggatttccttttaaactattcttatttgaaggcagagaaggacattaccatagagaaaaacattggcacagatcgattgagatttttgcagtgtgcgacggagaactggaatttaagatcgatgagaagacctggcatctgacagcgggagaatttatgattgtgaattcgaatgaggttcatgaagtagattctccgttgccaaacgagacgatcgttcttcagattccgttgaaagcttttgaaaaatattatacaggagagcaatttatctggtttacgcatgaaccgggacgtaaggacgcgcgctttatggaattgttggaagaactgtataagacatattgcgaaaagcagtgtggatatgacatgaagatgaacagtattttttatcatcttttatatctccttgtgaaagaataccgtctgacggaagttgaggatgcttttgtaaggaagaataagaatctgaacaagctttcagcaatcacatcttatatgaaagagaattatgcacaggaactcagtctggaagaagtggcaagaatttttggctactcaccaacgtacttgtcgaggatgtttcagaagtatgcgggaatcacatataagagctatctgcagaatatccgtctggaatatgcaatgaaagacctgaagggcggaaaatataatatcactgagacagcacttcgcagcggcttctccggaagcaaggcgatggcaagggcatttcggaaaaaatacggaattcttccaagtgaatatagagaaaatgggtaactgttcagagccaagcaaaatttcaaaaacaggcataaatgcttgcatttttaaaactgtttttgaaattttatttggcggatacgccacaccgacgaaatgcgtagcattttggaggttggctctgaacagtttagaggttggctctgaacagttacgaaaatggaatataaataaaaagaaaaaatgactaacagtacaaaatatattgactgttagtcatttttattgtatagtgcaagaagagattaaaatgaccaatggtcataaactgaatatgaggaaggaagcgaaaaaggatatgatggtaaagtttggaaaaaagatagtaaaattcagagtgccgattctgattctcagtatcttattgttgattccgtctgcattggggtatctgcatacgagaattaattatgatgtattaacttacctgccggataacatcgagacgatgaaaggccaggatattttggtaaatgatttcggtacaggtgcattttcgatgtttatagtcgatggaatggaagataaggatgtatcgaagctaaaagagaagattgagaaggtagatcatgtaaaagaggttatctggtatgattctatcgcagatatcagtatgccgaagagtatgctgccgacaaaggtttatgatgcatttaattccgagactgggacgatgatggcaatcttttttgatgaaggaacatcttcggatggaacaatggaagcaatctccgagatccgttctctggcgggcgagcagtgctttttaagtggtatgtcagctgttgttacagatacgaaggagctggcggagaaagagacaccgttgtatgtattgatcgcggttgtactggcgatgatcgtacttggtcttacaatggaatcgttctttgtaccgatcctcttcatgctcagtattggaattgcaattgtctataacttgggaagtaactactttatgggagagatctcctatattacaaaggcattggcagcagttctgcagctgggtgtaacgctggactattcgatcttcctgatgcatagttacgaagaacagcagatccgttacgacggagataaacaccgtgcaatggcacatgcaatctcacagacattttcatctgtaattggaagctccgtcacaacaattgccggatttatcgcactgtgctttatgtcattcacacttggacttgatatcggtgttgttatggttaagggtgttatccttggtgtacttgcctgcgtaacaatccttccatccatgatcctgtgttgtgacaagattattgagaagacaaaacataaaccattccttccggatatcggaagaatttcagacaaggttacaaagagatatctgatttatgtagcgctctttattgttttgttattcccggcaatctacggaaacaaccatacaggcgtttattacaatctggatgcgacacttccaaaagatcttccgagtatcattgcaaatgagaaattgaaggaagattacgacatgaatacgacgcacatgattcttgtagacagctctacagattcggcggccgtaggcaaaatgctgaatgagatggataaggtggacggaatcaaatgggcacttggacttgactccctgattgggccgtccgtaccggcaagcatgatcccggattcagtgacaagatcattaaagaatgataagtaccagcttgtactggcgaactcagaatataaggtagctacagatgaactgaatgaccagatcaaagaactgaatacgattcttcataaatatgataaaggtggaatgctgattggagaaggtcctctgacagcagacctgatcgacattacagataaagatttcaagacagtaagtgcagtatcaatcggaattattttcgtgatcataatgcttctgttcaagtcaatctcactgccgatcatcctggtaggcgttattgagttcgcgattttcgtcaatatgggtattccatactacatgggaactaagttgccattcgtggcatccatcgtaatcggaaccattcagcttggatccaccgtagactatgcaattcttatgacaactcgttataagagagagcgtaaccatggcgcaagtaaatacgattccatcacaactgcgcaccgcgtatccgcacagtccatcatggtaagtgcgttgagcttcttcgcagcaacgatcggtgtaggactttactccaacattgatatgatcagttccctgtgtatcctgatggcgagaggagcactgatcagtatggtagtcgtaatcttcgtactgccgtccatgttcatggtgtttgataaagtgatcgtgaagacaagtaagggattcctgccaccgaaggaataatgggtcgtggaatagaatgagagaggtatgccgaattaggatgctaaggcatatttcactttcagaaagaaaagataagaaatgggcattatttggctaattatttggtcgataatgcctttttaagttggtaaaatgaccatagaaacaaacgaaacaggaaacagacttcttgcagcgatgaataaatggctgatcgcgcatgaggatgcacagattgaaggtgcgttctgtgggttaaaaggtgagaacgtcgaagtctgattgaaaatggatgccggggtttccaaaaatcaggatcgtgttattcacaaggtttctgcatgatgtgtggaaaaccaaatgaaattacaggaaaagtgtggataacgtaacatgagaaagatagaaataataacaagtataaagaaagcgaggattttattatgagtaatatgccagaattaaaaatcggtgttgtagcagtgagcagagattgtttcccggagagtctttccgtgaacagaagaaaagcattgatcgatgcctacacaaagaaatacggtgaaggaactgtctatgaatgtccgatctgtattgtagagagcgagatccacatggtgcaggctctggaagatgtaaagaaagcaggatgtaacgcactggttgtttatcttggaaacttcggaccggagatttctgagacactgcttgcaaaacattttgacggaccgaagatgtttgtcgcagctgcagaggagacacaggataatctgacacagggacgtggagacgcttactgtggaatgcttaatgcaagctataacctgaaactcagaggagtaaaagcttacattccggagtatccggtaggaacagcagaggaatgtgctgatatgatccatgagttcgaaccaatcgcgagagcagttgtcggattaagtgacttaaagatcatcagctttggaccgcgtccgctgaatttccttgcatgtaatgcaccgatccaacagctttacaatatcggagttgagattgaggaaaattctgaacttgaccttttcgaggcttataataaacatgaaggtgatgagagaatcccggccgttgtaaaagagatggaagaagagctcggagcaggaaataagaaaccggagatccttccgaaactggctcagtatgagattactttgaaagactggatcgaggagcacagaggatacagaaaatacgttgcaatcgcaggaaaatgctggccggcattccagacacagttcggatttgttccatgttatgtaaacagccgtctgacagctcagggaatcccggtatcctgtgaggttgatatttacggagcactcagcgagtttatcggaactgctgtcagccaggatgcagtaacacttcttgatatcaacaatacagtaccggcagatatgtacaaagagagcatcgaaggaaaattcccatatacacagaaagatacatttatgggattccattgtggaaatacagcttccggcaaacttgctttctgcgaaatgaaatatcagatgatcatggcaagatctcttccaatcgaggttacacagggaacactggaaggagatatcaaacctggagacatcacattctacagactgcagagtacatctgacaatgtacttcgtgcttatgttgcacagggagaagtacttccggttgctacaaaatccttcggatctatcggagtgtttgcaattccggagatgggaagattctaccgtcacgtactgatcgaaaagaattatccacatcacggagcagttgctttcggacactttggaaaagcattgttcgaagtatttaaatacattggtgtgccggttgaagagatcggatacaaccagccgaagggtgtaagatatccaacagagaatccgtggggttaattacatagaaagttataagcatagaaaacgggcagagagccgtgccggaaacggcaaggctttctgtctttatacaggagaaacgacatgttatttgtaggagtagatcttggaacatccgcagtaaaacttcttctgatggatgagaatggaaagatcaagaatatcgtatcaaaagaatatccgttatatttcccacatccgggatggtcagagcagaaaccggaagactggtttgcacagagtatggaagggctgaaagagcttcttgaaggctttgataaggatcaagtaaagggaatcagttttggaggtcagatgcacggtcttgttgcgcttgataaggaagacaaggtgattcgcccggcaattctgtggaacgacggacgtactgcaaaacagaccgattacctgaatcaggtgattggaaaagagaagctttcagagtatacagcaaatattgcatttgccggatttacagcaccgaagattctctggatgaaggaaaatgaaccggagaattttgcaaagattgcgaagattatgcttccgaaggattaccttgcataccgcctgtcaggttctttttgcacagagtattcagatgcttccggaatgctgcttctggatgtggagcataagtgctggtctgcggaaatgcttgagatctgtggtattacagaggcacagcttccaaagctgtatgaaagctgggaagtcgttggaactttgaaagcagagatcgcagcagaacttggcgtatcagaggatgtaaaagtaattgcaggagccggggacaatgcggcggcagcagttggaacggcaacggtcggagacggcggatgcaatatttctctcggaacatcaggaacactctttatttccagtaagaaattcggagtagataagaacaatgcgctgcattcctttgaccatgcagacggtaactatcatctgatgggatgcatgctcagtgctgcttcctgtaataaatggtggatggatgaaatccttaagacaaaagattatccggcagaacaggcaggaatcacaaggctcggcgagaaccatgtgttctatcttccatatctgatgggagagcgttctcctcataatgccccttccgcaagagcagcatttatcggaatgtctatggacagcacaagagaagatatgacacaggcagtgctggaaggtgttgcattcggactgcgtgattctctggaagttgcaagaagtattggtgtgaatccagagagaacaaagatctgtggcggtggagcaaagagtccgctgtggagaaagatcattgcaaatgtgatgaatatgaaagtagatctgatcgaaagcgaagaaggtccgggctatggagcggcaatcctggcagcagttggatgcggtgtatttgattcggtggaagaggctgcgaagaaacttgtgaaagtaacaggaacagaagaaccggatccggaactggtgcagaagtacgaggaaagatatcaggaatttaagaaactgtatccggcattgaaaggattttttcaagaatagtaataactgacaaataaaaaattcccaatagaaaatcatgcttcagaaagcatctgagctgaaattctattgggagtttttgatattaggaaatcttacgctaaaaacaacgcatacagtatcacaagaataccaagcacgattctgtaatatccaaatactttgaaatcatgtttcttaatatatcccatcaggaattgaataacgataatagaagaaacaaatgcggttaccataccaatcagaagaattattgcttctgttccggtaaagttcagaccaaacttcacaagcttcagaagacttgcaccgaacataaccggaatcgcaagtacgaaagtgaattcagcagcaacggttctggatactccaaggatcaaagcaccgacaattgttgcaccggatctagatgttccagggaagattgcagcgatcagctggaaaagtccgatcaaaaatgcagtcttataagtaagctcgtccatactgttgatcttcgcaggtttgtccttgtgattattctcaacaatgataaatgcgataccgaagacaatcagagcaatcgcaacgcaagggtaattgtaaaaccatttctcaaacagatcattgaacggcattccgatcacaatcgcagggatacatgcaacaaggactttcagccagaggataatgatatccatcttcacataacttaaaattccatttccggctttcttttttctatgtgcatgttttgcctgacggcgtctgaccgtgtgacttccttccggtgcaccaaatgggaagatctggttccagaataagatgacaacggcaagaatcgcacctagctggatcacaacttcaaacatactgtagaattcttcggaaacatctaatttcacaaattgattcaaaagaatcagatgtcccgtgctgctgatcggcagccattctgtgattccttccacaattccaaagaggaaggatttcaaaaattcaatcattcttaatttatactcctttttattgatggattgcagctatactaagagattctagcaccaaatgcaatcatttttgtgcagctacacttatgttctaaagtggctcacggtttcttattataaaacgttggcaaaagatgtgcaagaaatagaaagtatttaaattgttaaatcgtcgatttaagaaattcctaatatttttccaatctatctcttaaaaaccatcaagtatcatgtatactatagttagaacttgatcatgtgataattatgttgctgcgctgttatcggtgtcagcaattatcgaggggtatgtaaaatgtataaaatattagtatgtgatgacgatagagaaatcgtagaagcaatcgaaatttatctttctcaggagggatatcagattttaaaagcatatgacggaatcgaagcactggagattttggagaaagaggaagtgaatcttctgatcatcgatgtcatgatgccaagacttgacggaatccgtgcaacattaaaaatccgcgagaagaacagtctgccaatcattatcttgtctgcgaaatcagaagataccgataagattcttggactcaatatcggtgcggatgattatgtaacaaagccgttcaatccgctggaacttgtggcacgagtgaaatcacagctgagacgatttaacgagcttggcggaacagcacaggagccaaaagagacgatttataaggtaggtggccttcagatcaatgatgatctcaagcaggtaacagtagacggagaatttgtgaaactgacaccaattgaatacaatatccttttgcttctgatgaagaatcagggaaaagtattttcaatcaatcagatttacgaatccatctggaatgaagaggcaattggtgcggataacacagttgcagttcacattcgtcatatcagagaaaaaatagaaatcaatccgaaagatccacgttacctgaaagtagtctggggtgtcggatataaaatcgaaaaagcatagtgcgaacagtaacaaaagcacatgtaaaaatggatagaaaaagcatataagagaacatataaaaatgcataagaaggcatataaggaagggttaacaatgaagaaatggtacaggaagactgtgacaaggacaatcgttcttgttgtggcgattcttagcggagcattgcttgtgacaaatttgctttctctcctgacactggcggggggaatgagtttgtcacagattcaaaagatgaatacacagtcttttgaagaatccgaagaattcagcaagatggttgaaagttacatgtacgatgtacaggagaagctttatctgcagaatctttttgaaagtgacggtgcctacaatccgaaaaaactggtggatgtaatggaactgtcaaagaagggaaagatatctgagacgaatctgtccggtgtcacgtacacaatggaagagctggtaaattggggcgagacttacagtgggacagataacgacaatctttacaaacagaatggcgtgattgtctgtcagaaaccggacggaaattattattactattatatgaatgatttcttttctcttgtaaatgcaggaaaacttcaatttcagatgggcgagcaggacagagatcagttcttggcaggattgcaggcgggcgaatttacgacttccggttattatacatttcagattacagatgaaaacggtgagctgctttatacagactgctggaactttggtcagtcaatgattgaaaaatatgcaccggtcggagcggataatctactccaggttgtaaataataatccgcagttaaatggaagactgacattggtttatgataatattgccacagcattgcagacaatctatgaagactggcaggattatgaaggcggttggaattatctggaagaagggaataccaattttacctatctgtatgcagatgaatcgacaaagaaggttactacaaataaagcagaatatgcaaattatgcagatgtaaagaaaagcatagaagacatgatagaatcagcgtcaaagaaccctgtgaaatatatggtaatctatcctgaattgaaagattttaagacgaatatgaacgtttcttattcggatcaatggctcaatacacgttcttatggttactattccggcggaacaaagtggaaagatgtttttgcagttgcagtggacacaaactatccgatccaggatcagttttaccagaatagcatcgaatatcaaaataacattccgcatatgaaagcggcattatattttatgattttcagcagcgtactctttttggtcacagtagtgtggctgacattgggtgccggaagaaaaccgcaggatgaagaactgcatttgttaaagttcgattcctggaagacagagattgctgctgcagttgttatttttgtctgggtgattggaagttatttcttttttgtagcaggaatcgatggaattcatatcttatttgatggaattacagggttgagtagttcatacggtgctgtggaaagtgatacatttattccatcatcctatgttccgaatgtatatatgcagactttaagtctcggagaatcagtaggtgcgtttgcatatggaacatttacatttacctgcttttttgccggctatcttagtctggtaagaagaattaaggcaaagagtctgtgggagaacagtctgcttcgaagcttcggtatatttatcgggaaaatattacgagacatgaagcttacaaagaaaacagcaggacttttgattctttatttcctgtttcagcttttcgtgctctggggtggagatttcttcctggtgattctgctgctgattgctgatgcagtgctattctattacatggttgcaaatgtgatggagaagaatcgattgagaaaaggaattcaggagatcgctgccggaaatatgagttatcagattccaatcgacggactgcatggggagaacaagaaatttgcattgatgatcaacgggatcggaaccggacttaacaaagcagttgccgaggcaatgaaaaacgaacgtcttaagacagatttgatcacaaatgtttctcatgatattaagacaccactgacttctattttgaactatgtcggtatcttaagacaaacagatccggcagatccgaaagttcaggattatctgaacattctggaagagaaagcacagagactgaagacattgacagaagatgtagtagaagcatcgaaagtcagcagcgggaatatttccctggaatatatggatcttgatctgtcggaaatgatccagcagacgcagggtgaactcgaagaaaaattcgaggcgagaaatctggcaatcgtcacagatcttccggcagaaccggctgttgtgcatgttgatggtagaagaatgtggcgtgtcttggaaaatatttacggaaatgcagccaagtacgcaatgcctggaaccagagtttacgcgactctgaaaacagatgatacaaaggtaagattttcattgaaaaatgtttccgagcatcagttgaatattcaggcggacgaactgacagaacgttttatccgcggagatatttccagaagtacggagggaagtggattaggactttctatagcgaagagccttacaacaatgcagggaggtacatttgatctgtatctggacggagatttgttccgggtagatattacatttccaagagtgaaagcaaaaggaaatgctgccggggtaacagaggaattagcagagaaatcatcaagcggtgtatcttgacattctattcgcgttatgctaccctttttaaggaatgaaaagcagtgataagcgaaacgcgatgaggaagagagtagtctgtaacagattctacagaaaagtcctgaaggctgtcaggccggatgttgagagggatggatggaagacagatgaagatggcttctgagcagcgcagatgagcctgaacagagtgagcaagtgagttgtttaagcagcaatcttgaataaaaagatccgggttagtctgtgaagggattcgccctttatagcgaagagtatcaacagtgagaaatgccgtagtattcaaagtggttttgattaacaaagcagtttttactaacgaaagtgcagatactcatagaggtttctttccgcgaggaaggaacgaagagaagtggtaacacggaagtaggattcgtcttctcagggatgcaagtccctgggagggcgttttttaatatattaggttctttcctaatatattaaaaacgctccgctagggatatgcgctgcggcgtacaaagtaggtgtcgcaagcgaccgccgcaagtgcaagaatgtgccttggcacattcttttttcgcgaaagatccagcagaaagtcgtaatagtagtcactggaatttgagaaaagaatcccacattgtgggaaaaggaggcagacaaatgtcagaaaaaccaaaatattatataacaacagcgatcgcctatacatcaggtaaaccgcatatcggaaacacatacgaggtcgtgcttgcagatgcaatcgcacgttacaagagaagccagggatatgatgtattcttccagacaggaacagatgagcacggacagaagatcgagctcaaagccgaggaggctggaatcacaccaaaggaattcgtagataatgtatcaacagaaatcaaaagaatctgggatctgatggatacatcttatgacaaattcatccgtacaacagatgaagatcatgagaaacaggttaagaagattttcaagaaactttacgacaagggagatatttacaagggacattatgaaggaatgtactgtacaccatgtgagtctttcttcacagagtctcagcttgtagatggaaaatgtcctgactgtggacgcccggttcagcctgcaaaagaagaggcatatttcttcaaaatgagcaaatatgcagatcgtctgatcgagcatatcaatacacacccggagttcattcagccggttgcccgtaagaacgagatgatgaacaacttccttcttccgggacttcaggatctgtgtgtatccagaacatccttcaagtggggaattccggtagatttcgatccaaagcacgttgtatatgtatggcttgatgctcttacaaactatatcacaggaattggatatgatgcagacggaaacagtacagagcagttcaacaagctgtggccggcagaccttcatctgatcggaaaagatatcatccgtttccatacaatttactggccaatcttccttatggcacttgatcttccacttccgaaacaggtgtttggacatccgtggctgcttcagggagacggtaagatgagtaagtctaaaggaaatgttctctatgcagatgaactcgttgatttctttggcgtagatgcagttcgttactttgtactgcatgaaatgccattcgagaatgacggtgttatttcctgggagctgatggtagagcgtttgaactctgatcttgcaaatacacttggaaaccttgtaaacagaactgtttctatgacaaacaaatacttcggcggaacagtagaagataagggtgttgtagaagatgtagatgcagaactgaaagcagttgtagagaatgcttctaaagcagttgatgctaagatggcagacctccgcgttgccgatgcgattacagaaatcttcaatctgttcaaacgctgcaataaatacattgatgagacaactccttgggtactcggaaaagatgaatccaagaaggatcgcctttctacagtactttggaatctgatccagagcatttctgaaggtgcaagacttcttgaatcctttatgccttctacaagtaagaagatccttgagcagcttggtaacggacatgtaacagagaaaccggagatcctgttccagcgaatggatctcgaagaggttatgaagaaagttgaagaacttcatccgaaggtagaagaaaagaaagaggaagaagctgttatcgacattgagccgaaagatgagatcacatttgagcagttcggagcaatgcagttccaggttggagagatcattgcatgtgaggctgtaaagaaatccaaaaagcttctctgctctcaggtaaaagttggaagccaggtaaaacagatcgtatccggaatcaaagcacattacacaccggaagaaatggttggtaagaaagttatggttcttgtaaacctgaaacctgcgaagctggcaggcgtactttcagaggggatgctgctttgtgcagaagatgcagaaggtaaccttgcactgatgacaccggaaaaagaaatgccggctggagcagaaatctgttaatcgaaatgtttgaaaattcagacaattacaaccaaagcagataataaataaaaaatataaaaaaatcaaaggaatatattgacaaattagacgccgaatgttattatataaccatcaaagagagaaagaaatctcccaaagatatttaactaagaaggcaaaagtaacagatgcctgattagattaaaaatacaagttcaacaggaggtcagtcccatggacagtatagtttcagatttttatcaatatgtcagtggtatgatgagtgaaggttcctgtgaagaaagagacctttgccaagcgtaaaagtccagtagaaagaaaagaagatcaaagatcggagagtacggaaactggaagcaaagagaaaaagatgaatcactcatagatgtattgaataaaaataccgcatataacatagaatgaaaaatgtgtaaagaaacattgaaaggacatgttataatctcagatttgttataaaagcaggaatgacttgacagaagatttaatacataaagtattgaatggatatgaaaatcattcaggtgataaaataacagacgacaaaggtctcacaggaacgtagaatcgcgaataatctccgatacaaaatataaaattataataataatacaattaaataacactaaaaatgcactttcaaaaggaattgaaggtgcatttttttgacattacagacctcatatggtagaataatgaaagagtatcggctagtgcctaatggacacattcagaccaaaactaatatttcaatgacaatgaggtgagtacagtggataagtatgaatataagttaaagacagaagagatgctggaacttatggaagatggagaatacagaaaagcagcggcagcagcagatctgattgactggaagcgtgtccgtaacgcagggatgctgatgaatgtcagtgatatttatgaaaaaacaaaagagtatcagaagagctatgatgtgatgaatcttgcatatcgccgttctgaaggaagccgcaaggtgatctataagttatgttctcttgcaattaagacaaagaatatagatgaagcaatcgactattatgacgaatttatccagattgcaccgaaagatccgaacaggcatatccttagatatcagatcttaagagcgcagagagcgccgatcgaacagcagattgaggctctggaggaatttaagaaggcagaatatattgaagagtgggcttatgaactggcgaagctttatcgcgaagcaggtatgatgacagaatgtctggaagaatgtgatgatctgatcctctggttcagcgagggtaagtatgtttataaggcaatggaactgaagatgcagtataagccattgtcaccatcgcagcagcagaaatatgatcacagatatgagaagctttcttcagagacagaagaaataccggatctgacttcctatttaggagaagacgaggaaaaagattctgcgtcagaaggagctgaagcacttggagatacaagatcaatcgggctgacagaacagccggtgatggagaacgacagtacttccgatgtgattgacacggatgcggttactttggaagcggcagaagagccggatgccgaagtagaaaatccggaagaagcaggagtagaaacagcagaagttatagaagcttccgaggatgagtcagaagttcagccggcaacggtagagacaagtggagataagagaacacttagcaaagatactgcttccataccgattgtcggtaagaatccggtaaaaccagtcaagaagaaacttggagatacgatgcggttagatgaagctctgcagcaattactcaatccgaaaccggaagttcaggcagaaccgggagaagaagtcgaaccggatatgacagatctggaagaggatattgcagcaattgaggatgtagaagatcttgagatcgtgaatcaactgacagaagagaagaaagctgaggaagccagtaaagaacgagtagttccatcagggatgaaagaactgataccggaaccggagacagaagaaaagcttatagaacaggcagtggaggagacttcagaagatgtcccggaagatgcagttactatagaagcaggagaagcagaaccggaagaagttcttgaagtagaagaggcagaaccggaagaggaagaaatccttgaagcaggagaagcagaaccggaagaggaagaaattcttgaagcaggggaagcagaaccggaagaggaagaaattcttgaagtagaagaagcagaaccggaagaggaagaaatccttgaagtagaagaagcagaaccggaagaggaagaaattcttgaaatagatgcagctgagtcagaagatctgacagatgaatcagaagatttgtctgaggtggaggaactgatctcagaaactgaagttgtcaatgatgaagatgattcagaaggagcagcagtaagagagactatggacaataaaaataatgaagaaccaattttatcaccagagatacagaaactgattgatgagattgaaggtgttattccggaagaggaagaagtagatgcaacagtaagttcagaagaagttcttgaggtagaagaagaaccacatgaaaatatgggagagcttgcggatgatctcagactcggtgaggatgagtacgaagattatgatgcgtatgactgggatgatgcagaagagtttgacgaagacgatattttagatgattatgaagagtctgatgacgatttgttggatgattatgaagagtctgatgacgatctgccggatgattatgaagagtctgatgatgatctgttcggtgaggaagaaggatatgatgatctggatgcctatggttatgaagaagacgatgaggatgatgaagtaattaatccaagagatcttttcacagcagaagataagatttcagatgatgatcttcttggtctgaattcttatgaagaagtgccaaattttgaagatgaattcagcgtgaatccagcgcatagtgaggaaccggatgacagagagattccggatgaagatgatggaattgatatcatgtctgcgacgacaccattgagccgtaaagagactgcaaaattgatcgcaacaggtaagacatcaccattaccgttagatgagattgcagatgcaatgtctgatacaggatttattgtacatggtcgttatgatcttgaaacacagagtggaatcggtacaagagcaggacttacagaggaacagaaaaaactcttctcttattttgtacctgtgcgtggtatgagtgagcagctggtagatgtacttgagcaggataagaactgtacaaaccgcaaaggaacttccagaacaggaaaccttctgattattggaaataaaggaaatggaaagacagtcctcgctgttgatgttgtaaaggcaattcagaagcagcgtgatatccgtcagggtaaggttgcaattgtgacaggtgagtcactgaataagaagagaatcggagacattttccgtaaattgtacggcggtgcactgatcattgaaaaagccggacagatgaacgaaaaaacactcgccaagctgaacaaagcaatggagcaggatacaggagaacttttggtagttcttgaagagcagagaaaaccactggacagacttctttcttccaacagagaattcagaagaaaatttacttccagacttgaagtgccgatctttattaatgatgagcttgtaacatttggacagacttatgctcaggagaatggttacagaatcgatgagatgggaattcttgcactgtacagtaagattgattctttacagagagaagatcatgcagtaacagtagcagaagtgaaagaagtgatggatgatgcgattgctcattcacaaaaagcttccgcaaagaaacttgtgaagagagtatttggaaagaatacagattcttccgacagaattctgctttcagagaaagatttcaacatttaatgacatatatttgttaagaattaatagacagtcagtaaaacgactgtctatttttgtgcaataatacattttctctttcttttttatacagtatcaagtataataaaactatagtgttcaaggggagaatgaaactttgttaccaattgaaagattcggtaatgtgccttgatctataagaaattgtatggtttttaaatcattacaatcaggaatatatttgagcagtgaggtggctttatggttaagaaaaacagcacgaagacgaaagtgcagccttatgagatcggagaacttgaccattatctttttgggcagggaaatcattatgagatttataaaaagatgggtgcccatgaggtgacaaagaacggaaaaagaggagtatattttgcggtatgggctcctcatgcagtaaacgtttctgtaatcggagagtttaatgactgggatgagacgaaagataagatgaagagaggagagtctctcggaatatacacatgcttcgttccggaggcgaaaaaaggggatttgtataagttctgtatagagacacaggcgggtgagaagatctataaagcagatccatttgctaattatgcagagcttcgaccgggaacagcatccagaattacagacatttctaatctgaactggtcagacagtaagtggatgacagctcgtgagaagtgggataacaaagaagaaccagtgtctatttacgaagtgcatatgggttcctggatgagacatcctggaagagaagatgaaggattctatacatatcgtgagtttgcagaagcaattacaaagtatgtaaaagagatgggatatactcatgttgagttgatgggaatcgcagagcatccgtttgacggttcctggggatatcaggtgaccggatattatgcaccaacttcacgttatggaacaccggaagattttgcatatatggtaaattatcttcataagaataatatcggtgttattcttgactgggtaccggcgcatttcccgaaagatgcacatggtctggcagattttgacggaacaccgacattcgaatatccagatccgagaaagggcgagcatcctgattggggaacgaaggttttcaattatgaaaaaccggaagtttccaacttccttctggcgaatgcattgttctgggttgaacattatcatgtagacggacttcgtgtagatgcagtggcatctatgctgtatttggactacggaagagaagatggacagtggattccgaataaatttggtggaaatgagaatcttgaggtgattgcattctttaaacatctgaattctgtagtttgcggaagaaataaaggcgttatgatgatcgcagaagagtccacagcatggccgaaggtgacaggatctcctgaggatgacggacttggatttactttgaagtggaatatgggatggatgcatgactttacagaatacatgaaactggatccttatttcagaaagaatgcacatcacatgatgacattttctatggaatatgcatattcagagaactatattcttgtactttctcatgatgaggttgttcatctgaaatgctccatgttgaataagatgccgggagaaggatgggataagttccgcaacttgaaggtggcatatgcatttatgatgggacatcctggaaagaagcttctctttatgggacaggagttcgcacagcttcgtgagtggagtgaagagagagaactggattggttccttcttgcagaagaaccacatcagcagattcagaactggtataaagatttgcttcatctttataagaagaataaggcattgtatgagttggataatgatccgaagggatttgactggatcaataaggatgatatcttccggagtattttcagtttcacaagacattcaaaagatggtaagaaaaatctgctctttgtatgcaattttacaccggtagacagaccagattaccgtgttggtgttccgagaagaaagcagtttaagcttgttcttaacagtgatgagacaaaatacggcggatcaggagaagaacgcccattggtttacaagccagagaaacaggaatgtgatggtcagaaatattcctttgcatatcctcttccgggatatggtgtggcagtatttgagtattaagttgtatagtataatgttttccacgaatagatggaacaggaattagacatacattaatttgcccctgcatagattgtaaaaaacaaactatgcaggggcttttctatgagagaatatattgaggagcgtgcagtggaaattgcaaattatattatagaaaataatgcgacagtgagacagacagcaaaacagtttcggattagtaagagtacggtgcataaggatgttacagaacgtctgcttcagatcaatccatcactggctcatgaaacacgtaaggttttagacaccaacaaatcagaacgtcacatccggggagggctcgctaccagagaaaaatatttacacttgcatgcttccaattattgaagttaatgttacaataaaagaggatattcaatcagaaacacggacattgagaggagactgttcaaatgcgggtggcaatcgttgaaagggatgaaaaagtattagaagaactgaaaaaaggtttaaaacgcgtagatccgaattacgagttggcggggattgcagggaacggacagtctgcatatgagatgataacagttatgcagccaaatcttgttatcatggacattgggcttccgcggatgaatgggttaaatcttttgagaaaattacgcacggaaggacgtgagttccgtgtgattattataacaaaggatgaagattttcaacaggcaaagcaggcaatcgatctgggggtggacggatatttagtacagccgttccggccgatggagcttaagaaggcattaagccgtattcatgaaaaaatcaggaatgaatattggatgcaggcttcttttactgttgaaaatgttctgttaagctgtagatatggagaaattatatcgaatcagaagttaaatgaaatgactatccggaaatatggttttacagtggatgatccgggatatttatttacggtttcaatggcagacgaatacgaggagcagaaggaaaatatacgtggatttctcgaagaaatctgtagacgtgagtgtggattttcggcatctgttatatgttcggatcgatggaaacaggtgtatctgatcatttaccgggtacgtgaagcaaggaactggaaagaatattttaaaaaaaatgtggttactgggttatgtaggaattttccggggacaattatttgtgtatggatagagacaaaacagctgacaaaactggtagatgcaatgattcaggcaggaagtctcatggaatggaatcttcttcagccgcgaggagttttaatctgtcagcagacagttgagaaatttgaagctgttccggtgcgttatccggtagaattagaacaacgaatgcgagaaatgattttcgatgaaaacaagaaaggaattgccagacaatttcaacttgtttgtgaggaaatgaaaagagaaaaatattttccaaaagaaataaaatacagtatcattcgtttttgcatggcagctggattgaattatagaaattatggcggggagattaacgaaacagaaatcctgagtcttatgcagcagattacctatgccatcagctggaaacagatagagaaagcgattcaaggcttggaacggatgatatcatatgagcataaatttgagcagtacagtacgcttatccaaaaagcaatggaaattataagaaaagaatatgacagtggtattacattggaagaagcagcgagccaactttatgtatcggaagaatacctgagttctcagtttaagaaggagacaggatataattttacagaaactgtgaggaaatacaggatagaaaaaataaaggagcttctcaggacaacaaaatataagatgaatcagattgcggggcttgtcggttactctgatcccaaatatatgagtaaggtgtttaaagaggaggaaggaattttaccgacggaatacagacgtaactccaatgggatttcataatcaggagtaattttatattacttacagaaaaaagtagagaataagagtcatatttaattaaaaaaatacacttttataaaaaatttcgcccttttaaatataaaaaatgtgctatgatatatgtgaaaagtgaaaaggatttcatagccgttaaggcagaaagaggtgaaaagaatgagcacaatgaacattactttcaaacacccggatgagatcattgatttcttgaaaacagtatgtaaatttgactttaacatggacatgagaagaggacgggcagtagtagatgcgaagtcattacttggaatcatgaatctgggattgaataacgtgattgaactgcagatgtatgcagacgattgcacagaacttgaaagacagctagaaagatttgcagcataaaatggaacataaaaatgggatgtcgagcatttgttcggcatcttttttgatatattatacccataacagtggatacatagaatgcgcactgcggtgtacaatgtaggtgtcgcaagcgaccaccgcaggcgtaagaggatgccgaggcacattctttgttctggatagatcagaaggggaataattaccgtgtatagtaatagaaattgtggataagattttattttacataaacaaatacttgtaaatcaatgcttcctctactataatgaaaaacagaaaaagatatataaataaagtaaatagttttgattggattttacaggaggaaagatttgaagaaagaattagtgattgtccttgactttggtggacagtataatcagctggttgccagacgtgtcagggaatgtaatgtatattgtgaaatttattcatataagacagatattgaaaaaatcaaagagatgaatccaaaaggaatcattctcacaggcggaccgaacagctgttatgagccggattcaccgacttattcagaagaactgttcaagcttggaattccggttctcggactttgctatggcgcacagctgatgtctcatgtacttggtggaaaagttgagcgtgcagatgtaagagaatacggtaagacagaagttattattgataaaaaagactccaaagtatttgagggtgtttcagagacaacaacatgttggatgagccattttgattatatttcaaagattgctccgggatttgaaattacagcacacactgctgactgtccggttgcagcagctgagaacgcagctgagaaactgtatgcaatccagttccatccagaagtacttcatacagtagaaggaacaaagatgatcaacaactttgtaaaaaatgtatgtgaatgtgcgggtgactggaagatggatgcttttgttgagaatacaattgcagagatccgcgagaaggttggaaacggaagagtattgctcgcattgtcaggtggggttgactcttcagtggcagcaggacttctttccaaagccattggaaaacagcttacttgtgtattcgtagatcacggacttcttcgtaaaaatgaaggagatgaagttgaggcaatcttcggaccagaaggacagtttgatctgaactttatccgcgtaaatgcgcaggaaagatattataacaaacttgcaggcgttacagagccagaagcaaaacgtaagattatcggtgaagaattcatccgtatcttcgaagaagaagcaaaaaagatcggtactgttgaattccttgcacagggaacaatttatccggatgtggtagaaagtggtcttggcggagaatccgctgtgatcaaatctcaccacaatgtaggaggacttccggattttgtagatttcaaagaaatcattgagccgcttcgtgatcttttcaaagatgaagttcgtaaagcaggacttgagctcggacttcctgaaagactcgtattccgtcagccattcccaggaccgggacttggagtacgtatcatcggcgaagtaacagctgagaaagttcgtatcgttcaggatgcagatgctatttatcgtgaagagattgaaaatgccggacttgataagacaattggtcagtattttgcagcacttacgaatatgagaagcgttggtgttatgggtgatgagagaacttatgattatgctgtagctcttagagccgttaatacgattgatttcatgactgcagaggcggcggagattccgtatgaagttctgaataaagtgatgagcagagttataaatgaagttcgtggggtgaatagaatattctatgatctgacgagtaagccaccgggaacgattgagttcgaataattttcaaaagctcgcaaagcctagtaaaatgggcatttgcgagcttgtttattgccttgtggtactattttggtactaaaaatgaaaatatgattgaataatttatgataattttccttggagtttatcgcatatcatttttatttcgtctgtcatttgttttaaattggatattgtaggtgctaacatgccatgaacaagagcatttctatatttccgtaattccataatgtgagagaattctacgggtgaaaatattaattttaagttatttgcactaaatggagtgcggtaattaggattcttattcatagatattgaattaataagcctctccagtaaaatccattgttccataaattgccctatggcggtgtgtaattctgtattttcttcagtagatgaggtttttaggctgatatatatattatatctgtctggattaccataaataatattatctgtgattatttcacttattgttcttaggtcttttgtaaagtcaagagattttaaataaggagttatatcagaagccgtcaaaatttcacatcgcaccattagattgaaaaggagttctacattacctaattttatctgtttattggattcaatcttgttttgatattttatatataggaaagaagcaagttcatattgattattaaaagctttttcgtttttgattctattttttgctgcttcatttaatcgctctaaagctatctcaccagctaaaactaagccatttagttcatcaagaatagataattcctcatttgatagatttccactgagtggcttatatactaaatcatgttctacttctgaccaagcgtgcattagcacggatgcaacttgaatttctgtttttgaattaacatatcttaattggttttcagttaaagaagtatctttaagtgatattcgataatgccttgcccaatagcctgaaaaacgtttattaaaattggtgattttttgagatgtaggaaatatttttggctcttgtagcagattgaaagtatctttgataatttcttctacattgtctctgtcacttggaaagtataaagcaacacgtactcctgaaaaatcacatatatcattatatatatcctctatgcatgaataatgatgttcgatgtctctttggataagtttagtatagagacgttgaggattttttgctcggtatgtaacaattgcacgaataccagaagtgtgcaatgcattttcaagttgttgtgcaacaagtttacttgcagtgtcataaaaatcatattcttttttatagtgttctataaattcatcaattatgttcatatatttactccttatacttacgcctgaggccatgttattttccactcaaaatattcattaggagaaatctctccattatttaatttcgttttcatttcacaccattccgtaaggaaatcatttaccaatccatattcaaaagttaatgcgacaggtgagcctgcactttcataatcatcttcattgtaagttggtctggcagcctcggaaggttttgccggagtcattgcagtcagatgaatcaggttgccgggagctgtgtactctgggaatcttgtaccttttccacgggcaggaagtgatgaggcactttcttcaagccagaaaagtgtttcaatgatatcctcagcagcaccaaggctgtaatcagagattgccttgtaattgcagtgcaatgcatcagcaagctttagaatcatatcttcaccgggaatgcgtgcaccggtttcatactgggatatgcggaccgacatatttttgccctcaaatccaagtgcaccgcccagttcatccattgtcattttacggaatacccgtattttctttattctttcaccaattgtcatagtgtagttacctccgtttatctgtctctgatggactgttaaagacagtataacacggaaaaaatgaaaatggaagtttttctatacaagaacattagaaaaacctcttgacaattcaataccacacggtatagaataatatcaattcaattatctatacgatatggtattgaaaaataactgaatgagcggtacagaaatctaacaggcatttgccatgacattcataggaatcgagcgaatgtagatactcccccaagcggaccgagtacctcgagcaggagcgggcggtattacaggagattatctcaggtgaggaggctggttgtgacatcagcagaactggtatggagaaacgccaaaacaaattttaatagaaaggtggtgaaagggcatgaacgaaaagtttttagaagtaggagatgtgatgcagattcttgggatttcaagatcagcagcatacaagcttatgagacagatcaacagtgaacttgaaaagaagggttatattgtaatccgtggaaaagtaagcagaaaatattttgaagaacgcatttatggtatgagtgatgcaggataagcaacaggtaagaagattgagacagaggcaggtgcaaaagttatatgggtttaggcatctgcttctgcatatggaaagaaggagatgatgaatatgccagcttataaagacagtaagacaggcacctggtttgtcaaattctattgtaaggactggactggggaaaataaacagataaagaagagaggatttgcaacaaaaagagaagcgttggattatgagcgtaattacaaaatacggcaggagaataatctggatatgacatttggagagttctggaagctgtatacagaggatgtgaaaaattatgtcaaactcaacacatggcttaccaaagaacacattgtggatacaaagatacttccatattttaagaatcttaagatgaatgagattacaccgggagatgtacgcaagtggcagaatgagatggttgcattccgtaatgagaatgggaagagttattcccagacttataagaagacaatgcacaacattttaagtgcgatattcaatcatgcgtgcaggttttataatctgaaatcaaatccggcaaggcaggctggaaatatgggcagggaagaaaagaaggaaatgcttttctggacaactgaagaatataaaaagttttcagaagcggtgattgacaagccggtttcattttatgcatttgaaatgctgtactggacaggaatgagattaggtgagttgcttgcacttgcgatggaagattttgattttgaaaagaacacagtcagaataaataaatcgtatcagcggctgcaggggcaggatgttattacaacaccgaaaacacctaagagcaacagaacaatcaagttgccgaagttccttgccgaagaaatgcaggaatattttgcaatgttatatgaccagacaccaacagacaggatttttctggtaacaaagagctttcttcatcatgagatggagcgtggttgcaaattatccggtgtgaagaaaatcagaatccatgatctaaggcattcgcacatttcacatctgatcgacctcgggttttccgcagttgcaatagctgacagggttggtcatgagagcattgatatcacatatcgttattcgcatctgtttccgtcaaagcaggtggcaatggcggacagacttgatgctgtcaatgcaagctttgaggattgtgaagagcaggatgatgatgtagaaatcatgcagacagaggaaacagcacctatgattgatatggatgcggctgcggaaaagattataagcatttataagtacaaggcagtctgataatgcgggtacaagttttgctggatatatgaagcaaaaattaaaagaatggattttatatcggaaggagcagattattatgagcgagaaaaggctagatgccaagaacagatggagaaatgttgtagtagcgtttcgtatgtcaccggaggaagcacaggagctgaatgtgaaggtttcactcagcggactttcaaaacaggattatatcatacaatgtcttctgaagcatgaaatcagggttgttggtggaatgaaggtggcaaagaaagtacaggtgcatcttgatacgatactggaagaattacagacattagatgaagcagacagaggtatagatgttgaagaactgctggttccattaaagcatgtgcttgatattctgcagagtgatgagaaaggcggtaatcattatgagtaagacaacatttgaaaagcttggcatcccatatgaagaaagggatggaatcttttatccggtgcttgtcgcaggaacagagaaggcagatatagatgtaggaaagtatgggcgaatgtggattaaatatatcaaggaagaatatccaatgagatataagagtctggtgcggttcggggagcttgaagagcgagcagatgaagtcaatgaaacagcatatgagctgcttgatgatattgaagctaagtggctgaaacagcataagccgaaaaatccaaattcctttacagaacagttacagctaagaacacagaccaggatgatggcagaggaaatcgttattatggatgtggtaatgcagtttcattagtgtgggggcaaaaagcgccgtcaaaacatgaaaatgggggcaaaaagcgcccccaaaaccacaaagtgggggcagaaagcgcccccgcacaaattagagctgaaaaaagtgtgggggcaaaaagtgccgtcaaaatgcaaaagtgggggcaaaaagcgccgtcaaaacagcaaagtgacggcaaaaagcgccaccactcagataagcgagaaaaaagccatggtggcggaaagtgccatcaaaatggaaaagtggtggcggaaaatgccactaaaacagtaaagtgatggcaaaaagtgccaccatatcagtaattgtggtggtacattaaccaccacatattatatacagggtgcaggtgctcctgccaagacgaaaaattatgtaaacgctgatggcgtttatattttttcgggaaaaggtccgaccttttccgcatcttgcaaaaccagtgaacactacttttagaaaggatgaaaaaagcaatggtacagataaaaagagattggtttgatacagcattgaagaattacgaaagaggtgaaacgtatggtagatggaaagcgaagatacaagtctgacaggaaagatcataaggtatctgtgaagctgtcggagaaagatatggatattctaaaagcagcacttaaccggacgggaatgacagcaagtgcctatataagagaattgatccggacgggcggcaacatagatacaagttatcctgaggacagggcaaaagcaatccgtatcatagcaggtattgcaaataatattaatcagacggtaaagcttggcaattcacaggggagattgtattgcagcgatattgataaattggagaacagtctggatgatgtaaagaaaacattcggggaggtgctggaagtatggcgattacaaagatcttaaatatacaggagtcagatggcagaaatccggcatcacacctgaagaatgctttggaatatatacagaatccggataagacagaagaatgtgtactggtgggcagtattaactgcctgccggatacggcatttgagcagatggaggagacgaagaatatatttcataagacaggtaaaaggcagggctatcatgtgatcatatcattttcaccggaagaaaaagtgacggcagagcaggcaatgtatgtgctggagcactttgcaaagtatgtgcttggtaatgattatgaggcggtgtatgcagttcatactgacagggaacatatgcatgggcatctgatctggaatagtgtgagtatgacaaccggcaagaagtataattcacctaaaggcaattggaagaatcatctgcagccgattacaaataaatattgtgatgagcttggactttccataatgctggcagagtatagcagaaatccaaagaatattagcagggacaagtgggaaaaggaaatgtccatgaaggatattatacttcgtgatgctaagatgtgtgcgtatgcagccggaaatgtggagcattttaaatatctgatgaaaagacttggatatgtatttaagaaagacgcgtggatggaggtacaggcaccgggatttcggtattatcataagcttgcaaaaatggacgagatgttttcagaagatatgctaaggcatcatgtggatatgccttggatggcaaagccttacttttattcgtcggatatcagggggctgcacagggcgaagctgtcaccattccagaagaagttttatgcaaagctatacagattaagggttgtagaacagaagcgttttgtagttggtggagcaaagtatgcagaggatttgaagaggtttcatcagttacaggatgaatatctgctgcttgtaaataatgacatcaaaagtgttatgaatcttgtggatttcataaatgagcaggaagaaaagattcagcagattgaggacagacagcatgagatatacagagaaagctctagtcggaaacgcaatataaagaatgaagagcagtaccgggaatatcagatatggcatgtggaagtgcaggaagaactggacgaactgaagcaggagaaaagggaaattaagaggcagatacagcttgctgatgacattataaaagaagatttgtatacggcttattatgcggtgtcggggaaggaggagattgttgctgacagggatgttgagataccggggatggaagaggatactgcggttgagaaagcaacggcaacagtcgttgagcctgatagaaatgttgaggtgatgaatcctaacaataatcagaatgaaataagcagactgaaagagcaatctgatagtgcgagaaaacaacagactgatttagatggcataggaataccagagattcataattcgtctgatgtgaatgtggcaggagtgggcgaaagtataactgatgtaacagataaaaatgaatttgtggaaattagagaaactgaacctgtggataaagctggctggattgttaggagaatatcagagcttggtggttatgagaatgtcagtgattctgttaaggctgatgtatttggatttgatattgcagatgtgagtggaagtataagactgttttcggacgtaatgaaacggttggagataaagctggatggtgatgaaatgtatgaggagttccagagaatttatgatgagagtgttagcagagatgctggtaaagataaggcggaagataagatgtggaataggggcagaggaaggtgatttctctgcccaatattaaattaagaatggatgtataattgaacactaaatatatattaaatactaataaatcatatttaaacagtgaaatatcagttgagggaaacagatgttcgtgatataattactttgttattttatacattttagaatcggagggagaatatgtctgagactaatgaaaaatggtctaatttagaagaaactgcagaatatctaggtgtaacgaaagataccataagaagttggattaaaaaaacagatattcctgctcataagataggcagactttggaaattcaaattttcagaagtggatgagtgggtgaaaagcggaaaaagtgcattatagaatagaaagtagaaaagaaaatgataaatacagaattacataatggagattgtcttgagtatatgaaaaaaataccaacatcttcgattgatttgataataacagatccaccatataatttaggaaagtttatggaggagagagatactaatttagttaaaatgcgggataatttttttggggctgcaggatgggatgatttagattataaagaatggaaaaaatctatgaataaattttttcatcaagcatcaagagttttgaaggatggtggttcaataattgtatttatggcgataataaaggttgagacaataatacaattagcacaaaaacacggactgtattataagacaactggtatatggcataagtctaatccaatgccaaggaatatgaatttgcattttgttaattcgacagaatcgtggatatattttacttataaaacaaagacagggacatttaacaacaacggaaaagtattgcatgactttattgaaacatctgttacatcaaacagcgaaaaaaaatatggaaaacatccaacgcagaaaccggaagctttaatggaacattttgttaaggtgttgtcaaatgaaaatgatacaattctggatccttttatgggaagtggaagtgttggtgtgtcagctgtaaaaaacaataggaatttcataggaatcgagttagatgaaaattactttaatatagctatatctaggattaaagaggtaaagaaagatgaaatataaggttatagatttatttgctggagttggtggaatgtcattaggttttgaaatggcagggtttgatgtggttcttgccaatgaatacgataaagatattgcaactgcatataaaaagaatcatagttctactaaaatgataaatgaagatataaccaaacttgatttgcaatcagtatttgaacaatataaaggtaatattgacgttataataggcggtccgccatgtcagggtttttcgcagaaaggaaagagaaaaacaatacatgatgaacgtaatttcttgtttaaatattacgttaaagtggtggatttagtaaaacctcaatattttgtaatggaaaatgtgcctaatttattaactgctgaaaaaggatattttaagcgagaaatagaagaattattttcaaaaatggggtacattctagatgctggtgtattaaatgcagcggattatggagttccgcaaaatcgaagacgtgccgtcattattggaaaaaagacaaatgaagaaagggtaaacttgctgcctaaaccgattaataaaaaagtttcagtatgggatgcaataagtgatttagcatatcttaattctggtgagggtgatgaaattcaggattataaattcgaagccagaagtgaatatcaaaagaagatgagaatgaattcaaataaattgcttaatcataaagcaactaatcattcgaagcttgcattagaacgcttagcccttgttccaccagaacagggaaaggaatgtttaccagaggaacatttaacaaaatcaatatatagtggtacttggtgcagaatgcaaaaagatgatgtttctgtaacaattacaacaagatttgatactccgtcatcaggtagatttacacatccatatttgaacagggcaattacagtgcgcgaagcagcaagaatacagtcatttcctgatacttttgagtttgttggaccaaaggtttcacagatgaaacaagtaggaaatgcggtaccaccgctattggctaataagattgccgattcaatattaaatgacataacataggaggaatgtttaaatgaaaagaccaagtaatatacagaaatttaaacctgttgatcctaaattgggaattaaatcatctttgcctaaatcaaagtctacaattgctcttgtaattttgctatggttgtcaaatgacaaaaagtatgaaattgagtattctgagacagatggcgataaaataacgatatctgagaactgttatgataaattgatacaatatttgagaaataatatagatattaaaggcgattctgaagaagatatcatgaattatgtaaatgaaaaccaattatttcattcacagttagagtcgcttattgttgcacttgaattagtgtggagaattgcatctattaaatttaaggatagtaataaagcggatagtgcagaaagaactgggaagaaaagatttgagaaaatattatcgtatacaaataatattgatttatttgacactttgattgaaagcaataaaaaatattgccaagtattatatgaatggctacaaggaaagaagaatgtagaagatacacatttagaaaaacaattggttagagttataaattatctttcagatgatgttgtgttgaaaatgttagacaataatcagaacgtatattttaatatgacatccgtgtatgaagctatgacacaaaaaacagatgaaattgatatcaatggagatggagaagcaaagggtgcattaagaattgtaaaaggtgctttaggagaaggactaaattactatttggcatataataagaacattgttacaatgtcggataatgtagattatgatgaatttgtatattatgaacaaagggtaagagagcgacagaaaataagtaatgtgaatatattgctccacgctgcggaaaatgatgatgaaaatacaactgacatttcgtgttcaaaaaataggataatatttggtgctccgggaactggtaagagtcataaactagaggaaaatagcaaatattttgctgataatatggaaagagtaacattccatccaaactattcgtatgcaaattttgtaggtgcatataaacctattatgtcaaagtcagacgtatatgacaatcttgatactgaaaagagaagagtgcttgcagttctgcaagacaaatcaatgtcagcacaagaaaaatatgatgaattgtacgataaattcaaggatgaaggtttaactcgtctaccattattactaggtatatatacggatgagaattttaaaactagaaaagtggatggtagtgatgctgccggtgataatagtgtggagagaaatcatggaagggctattagaccatatttaagtttaaatccacagaataaaaataaagaaatctcgtatgagttcgttccgggtccatttatgagaatttatgtgcaagcaataaaccatccggaagaagattacttattgttaatagaggaaattaatagagcaaatgtagcagcagtgtttggagatgtatttcaattacttgatagaaagaatggagtaagtgaatatccaattgctacaagcgaggatataaagacttatttattagaaaacttggattgcctaaaaggaaaaaatattgatgatttaacagaagaagaaagagaaaagtattttgagatgagaattccggcaaatatgtacatatgggcaacgatgaacagtgcagatcagggcgtatttccaatggacacagcatttaagcgtagatgggaattcgaatatttaagtgtcaatgatgatgagcaggttgcagcaataaaagattatgtcataccaatgtgtatcaaggacaataaagcggatcattatattggctgggatagtttaagaacaaggataaataatattttgacatctgaaaagtgtaaagttaatgaagacaagcttttaggaccattttttatatctaaaaatatgttagacgagataaagaataataaagagcaagtagacgaattagaagcaaaagatgaagcttctcggactgagaaggataatgaagcacttaaagatatgcatcaaaaagagaatagttatataaaagcatttgaaagtaaagtaatcatgtatttgtttgaagatgttatgaagatgcgtccggagaacatatttataggtcataataaaaagaatggaaagatgattttttcagaaatatgtaaagcctttgagcaggatggtgaaggcatatttggaattgaagatttggtaaatatataaaaaggggatgagagacaatgacgaaaggtttctttcgtgaaagaaagcattattctttacaggaaataacagacaatttaattaacataaatatggaagaaaccagacgcattgtcgggattcttaaaaaatatggagtagttaaagctgtaaaaaagaataggccggattttgatgatttatcaaatgaagatattgtcttgactgatgtaatagacagctcaagcgatatagaatatatatttgattatgttggagttgttgtaatcgaggggcaagtttttaaatgttatcctaaatatatcaaatcaacagaacatttatttgaaaatctaaagcaggttttaaaggttataaaaaaatacaatgcatcagaacaattgatttatctgtttaatggagaagatgatagtaagatttttaatagactggctgtatctattcatttgttagagacatactatgctgatggtttgtatacaaatcagaaagaaataattgaaacaaatggagaaggtgagattttatgggataagactataaatgaaacatttgcaattatacagaataacaaaccatattatgtggaattacaaaccaagaatacgattgacaatgactatgattattttcggcggttacatgaatgcgttcttacacaatgtagcagagaattatcagatgcaggacttttagaattatttgaattaacagaagttgagctgacacaagaagaaatgtctgattttggtgatgcgagttatatattatatcggttgcagtctgagatacaaactcaatatattacaaggaaacagaatcttctaaaaacaatatatacatatattgctaacgagaaaacagacaaaaatgatgtgagctatagtttatatggaactaatagttttaatttggtttgggaaaaagtatgtgcagataattttggaagtgttctagataagaaaatagtagatcttccattaagtaatccggaatggaataaagttgaatataaagataaaacattaagaaaagtgattaaatcaccaagatggagaaaaatagagtttccggatgtagaagatccgaaggtggaaacattaaaacctgatttggtatgcatatatcctgttgatgaacagaaaaaagattattgctttggaatatatgatgcaaaatattattgtatagattatcaaatacatggagataaagttatcattagtggacaaccgggtgtaggtgatgtcacaaagcaatatttatatcaattagcatttgatgattttattatgaaacagggatacagatatgtgcaaaatatgtttttctgtccagatgaagttggagataagcagtatggttgggtacagatggaaattctaaatcatattgggaataaaagattggaaaacatagcggttgtaaaattatgtgcatcaaagatgtatcaactgtatcttgataatcagacaattagtgagcatgagattaatcaatatatagcagatataggtagacaagaaatatcagagcaaaattttgctaatcgaatgctggcatatcttatgcgtattacaaacgctagtaaaatggctgaggaaaaacttgagatgaaagcagacaaaggtaaattgatatatcctagacagataaaaagagaactgggagcaaagattatctatgatgctatctgcccggttgcaagcaaagctttttatggatttaatccgtatgaaaaagaaaactatggcactatggtagcagaggatataggcaattcttatggaagatgtaatcagattgcggatgcatctattgaaatagagaaaaagataaaagagttgtcggaaaaggaacttcaggatgaaaaggtaattatagatattctcaggaagtgctttgagggtaaagaagatatagcatctatggctgaaggggataacttggagatgcttgtggaaaaagttatggaattagtaaggaatttgtatttgtaaattgtaattaatatttcataattttgaagataggtattaactgcctaagtaaaatggtcaattgaatttaagaaagaacgagaaagtgatgagactgaaatgaataagaagtgccaaatatttactcctgatgggtatgtaaaaaaactattggattgtatacagtattgcgaaaatatatacgacaagaacatattggagaattcatgtggagatgggaatattttggctgtaattgcagaacgatatattgatgatgcaaaagcacatggattatcaaatcaacagataaaaaaaggtttatcaaagcatatatgtggtgtagagattgatccagaacaatataagaagtgccttcagaaattaaattcgttagcaaaaaaaagggggataaatggtgttaggtggaatattgttaatgaagattatttaaaatgggaatgtgatagaaaatttgaatttattgtagggaatcctccttatattacatatcaagaattagatgaagaaaatagagattatgtaagaaaaaatttttctacatgtgaaaaaggaaaatttgactattgttatgcatttattgaaagaagtgtagacagcttgagtgatgatggtaaaatgtcttatttaattccaagtagtatatttaaaacggtatttgggaaaaaacttcgttcttatattaaaccatacttacaagaaatatatgattatactcaggataaaatgtttgatgatgtattagtaaaatcagccataattataattaataaatctataacgaacaatgaaatgatttattatgatatggcaaatgaggataaaatatatattaatactgaaaatttaacaaataaatggttttttacaaaaaataatatacctggaacaaggcgttttggagattattttcaggttgctcatgtagttgcaaccttattaaatgaagcctatgtgttaaaagaggaaaactgtcaagatataaatgagttttattgttgtaatggcaaaaaaatagaaaaaaaggttgttagggaaacagcaactccgcgctcgttacgatataaaaaaagggaaaaaataattttcccttatgattataaaaatggaaaattaattagatattcaacgcagcagtttaacacacaatttcctggagcagttagttatttaaatgactttagagaacagcttgatgaacgagaaagtgacagaaacgcattatggtttgaatatggtcgctctcaagcattagcaggattgaacaaaagaaaattattgatttctacagtcatcactgaaaaagtagtagtatatatgttaaagaaaaagtgtataccatatgcaggaatgtatattgtgccaaaagcagataataaaacatataaactggaggatgctaaggaaattttagaaagtgatgaatttatgaagtatgtccaagatgtagggattcatattagtggaacttctttgagaattacatcaaaggatattgaagaattcaaattttaggaggtggcttgagtggaagaattaaagtatgttatagaagatagtacgatagcggaattgttaggtgtgcagaatttttctacagatgaggctgcaatacttgaattagttaagaatgcatatgatgctaatgccttgaatttaaaaattacatttcagaatgacacacttcgatttgaagataatggcattggcatgaatgcagacgatataaaaaaacattggatgcatataggtaaaagtagcaaagaatatgaaataatagatgaaaataataaaaaaagaattcaagctggttcgaaaggtgttggaagatttgcattatcgagactagggtatagagtatgtttgaaatcaaaaaaaatagattctgttggtgtaatttggaaaacagattggaatacatctgttttagatgagaactacgacattcacactaaaggaacagatatagaaataataggattaagggaaaagtggaataaaaaacgcatagaaaatttaaataagtacttagaaagaacttatcatgatacatctatggagataagaatcatttcagataattatgatgaaattgtagtggaacattttcctaaagctgaagtcggaatcaattgtagaagtaatattgttttaaagtataaccaaggaatcttagtgacatcagtagagtcagatgagttcgaaaatgaggctttaaaatattgttcagggattgatataaaaaaatatgaaacgaaaacggatattgttaatgagttgaaaggaaacaaaattacggagcttttagatgctgatatacaaacagtggttaatgatattggcgaattttcagcaaatttatactttaatatttccacatcaaaagatgaaaaagagaaatttttatacaagtatttaaacacacctaaaaatattgaaagtggaataatattatatagaaatgcatttagtatatcttcatatgaaggaaggaaagattggttaggacttggaaaaagatctagaaaatcccctgcggcagcttctcatccaacgggtgcatggcgtgtgagagaaaatcagatggcaggttatgtcatgatagataaaaagaagaatgctgtgcttcaggatatggctaaccgccaaggcttagatgaaaatatttattatcagttatttgttgaaataatattagtaggcattaaagaatttgaaagatatagacaaaatattgttagaaaaataaatgctaagaatcaggtagaagggcaaaaagcaacacctatttctgatcgagtattaaaccgaccgacatctgttagtggtttaacaaaggaagaagcaaagcaattagcaacagaaatcaaaagttataaaaaggagggaaaacaatatcagaaagataaagaagcggtagaggctagatataaatatgatgtaagaattttaaatgtattagcaacaacgggattaaaagcttcatccattgcgcatgaaatgaaaaatgatagaaatgccatatatgataattacaataatatagtagatgcattaaaagaatatggtatgtgggatgaattgaattcttctgaaaaaacgagaaaatcttataaaaatgtaccttatttgttggaaagtaatgatgttgttggaaaaaaattggtgacattcatggacactatgttggaagaaatagaaaaaaaacagtttgagattaggtaccagagtatagcagatatcttaactgttataaaaaaagtgtgggaaagagattacgcatggcttagtattgaaattataatggatgaagatattgtttatcagatttcagaagatatattgcaggttatttttgataatctgattttaaatagtgtgcagcaaaatgaaaatacgcaaaaactaatgatcactatatctataaatgagactaatggatttttaaatattaaatattgtgataatggaaaaggacttaatgataagtataaaacggatccgatgaaaatattagaggtacatgaaactacaagaactaacgggcatggtctcggaatgtggattgtaaataatacatgtacaatgtcaggaggagaaatacagaaaatatgtggggaaaagggatttgaaatagaattcactataggaggaaaaatataatggaaaacttaaaaattatatatatatagatgattatccggagacttcattatccaaatatttggataaatataagaattcgagttgtaatgttgaatctttagatattaaattcaatccagatgcaggatacgagagtttgattaataatccggatgttaaatcagcaaatataatttttatagactcaaaattatttgaaaatagaacagcaatagcaggaaagtttacaggagaagaatttaaaattattctaaaaaaatattttccgtttatagaggtgattgttattacacaaaatgaaatcgccccagattatgaaacaatttctaaatatgatcctaaatgcggaaagacgccagtggaatattatgatgaaaagcttcctccaatattggaccaatgtattagaaatatttttgaagttagaaaaattacctcagaattgcaaaagaatactagctgggaaaaagttatggtcgaaaaaatagtgaattcagttaatggtcaaggaaaatttgatgaatttactaagaatgatattgatgatgtgataaaaatgtttcaagagttgcagacaaaagtagagggataggaatatggactacagaagaacaaagtattgtccagaattaattgatgtgtcacaaaaaaagaaagaagtagaaaaattagttgaaatagagcaccctaatgcaaaagatatgcatagatatattagtgataattctcagaaatttaagttggaatttattaaagcatataatgggaaatgtgcatattgtggagcttcaattgatttgataaaaaagactgaatttgaaatagatcattttttatatgaaaaagctcctatatttgctacaaaaaaagatgcaggttatatgggaaatttaatcttatcatgtcatgactgtaatcataataaaaattcattttggattgaaaaggaagaaatggatacattgaatccggatggagaaaaaattaagaatgtatttataagagatgacaaatattatattcggataaatgatgagtttaaaaaaaatacaactatagaagggttttataataagctttgtttgggatcggaattacataggctggattatttaataatgaatataattggattgcagaggtattgtgaagacaatagtgatttatatgtcggacttggaaaaatactggatataataaggaaaaagagaaatattatgtagaataaagttctaatcataatgttttatttatgcaatattacgcagaaaaatttttgcaaagaaggaagtgaattcatggacataaagcagctaattggtgaaaccacagattatgacaaaaagcttgctcttgaagagaagaaacctaaaagttggtgcaagagcatcagtgcgtttgctaattgttttggtggcaagttgatatttggtgtatctaatgatagtgagctggtgggacttgcggatgcagaaagtgatgcagagaaaattagtgagataattaaaacacatcttaatccaatacctgagtttaagctttcgtttgaaaaagatggggacaagacttttgttattgtagaggttatgaaagggcagcagacaccatactattatgaaggtgatggacaactcattgcatttatgcgtattggaaatgaaagtgttccagcaacacctttacagttaagagagttggtacttcgtggaagtggtgaaagttatgatagtctgaagtcaagatatgattttagcaatatgtctttcacaaaattaaaatcggtatataagcaaagaacaggaaatgcgtttgaagatactgattatgaatcttttggtttgattgatgagaaaggcaatctgacgaatgcaggagcacttctggcagatgaatctccggttcgccattccagattattttgcacaaggtggaatggacttacgaaggcatctggtatagtagatgcacttgatgataaggaatatactggcagtcttgtcacactattacaggcaggaacagattttgtaagaaataattccaagaaagcatggcgtaaggttgatgatggcagaattgaaatgcctgattatccggatcgtgcagtgcttgaaggtgtggtaaatgcattgattcatagaaattatatggaaataggtagtgaagttcacatagatatgtttgatgatagaatcgaaatatattcaccgggtggaatggtaagcggaatatctttagcgggaaaagatttattgaaaatcccatcaaagcgaagaaatccgatattagctgatatattcagccgtttgaaatacatggagcgtagaggtagtggatttaagaaaatattggcagactacgagggtcaggttgaatttgacgagaccaagatgccagtctttgatgcagataatgatgattttacattgactttgtataatctgaattatggcactaattatgcaacacaggtgaatgaaaatgtcatagaaaatgtcatagaaaatgtcatagaaatttcggaagaaaaaatgaagcagttaatgccagagtattctaagaagaagcttgctaaagcatatgagattctgaaaatgatttcggaaaacccgaatatttctattgatgaattaagaatagccttagatgtcacagatagaacaattgctagatatatatcagaattaaaggataaaggtatcatagaacgaaaaggtccagataatggtggtaaatggaaaattaagtaagtgaatgacagtaaatatggcactcaatgtgacacccaaacttttactcaagaatattccgaagttagtctcaacgaagtctcactagatttgagactgagtgagactctatgatatagcaaaatgcgataaaaccgggatttgcaggtaaattataaagttgtagtctcaagacagtctcatttttgaaatcgtttgttgagactaacatgagactgaggaggttcaaaatcatggacataagtaaaaaagattggaagctatttcgagaaagattatcaggttggcaggaaaattatatggaaggtcttgttaaagagtatgcaaattttctgaatgatgataaaaagcctgcatcagagaaattctgggaacttgaaaaacggataaaagaagataaacgtcattcgggagttgtcatggaactgaaaaaatcagaggtaatatgggatattgttcgtcttattagactgaaagtaattacatataatgatttatcagactttagtgatgaattacagaatgaagtaaaaagaatacttgagatgagcaggtgatacatatggagattggtgcaacaaaagcagttcaagatcgactaaaaacaacaaatattgaagaaagcaaaggcgcttcacttgtgttctgttgggacacgcatttgacgaaaatacaaggaagaaatgtcttgtttattgtgaatgctagtaatcgttatacaatagcaatgacagatattgagcagggaaactggaattactatacaatgtatatcagccgtgtgattcatggcgtgatgcaggaaatgggatattccgaggatcagatagggcagtattttaaaatgtcaggcgatacaactgtaacaaaaactcatggtaggaaatcagttggtggcattaacagaatggtaatggatgcacagtattttggtaaaaagttggataaagaagcaaagtatcaatgggaacttagtgagtatctgaacagagatatctgccaaccagagggatttgatgcgtatggatatccgagtgaactttttaaattagacatggaacgattagggattgctgctaagagaaagccagcaaaggtaattgatttcgctcagtatatagaaaacaatcgtggtactaacgattagtaccacaaaatttttccttgcagaaatatcgcttggagattataatttccataggtggacttgcaaaccgacagaaatttattctgtgaatagtaaacaaacctgcaagccaccggaactacacacaataatgacaatatagcaatggtactggattggtactaaaaatatgtgaaacgaagaataacgtgtggaaaaagtatgagttatcaatacaaaacggtatagataactgcactgaaataatcaaaatcaaaccagactttgcgagtttgaatagttggagctaagctgtaaagcctttgtttacaagggttttacagcttttcctttataggattgcattttcattgcattatttttcttcaactgttctgtgatagattgctgtatgttgattgctggtataattagcaatgctttcagtagcagattgtacttgtaatattccagtcagctttttagcaacttcaagattcgtatttggatacagatgaccataagtgccgagtgttgtctgtattttttcatgtcctaaacgttccttgataagtaaaggattttcgcccatgctgataagcaatgaagcgtgtgaatgtcgcaaggcatgaattttaatacgatgaacacctgctaaatttgacaacttttccaaagctctgggaagcgttgttttactggttggagttccgttataacttagtacaagtggacaatcgggaagaacctgttgctgaacactttgccaagcctttagctcattgagtgtatctgaatcaatataaatagtacggatacttgcctgtgttttcggctcaacgaatttatagtccgtcattgttcggtaatataatgttttggtaatgctaagcaagcctgtttcaaaatctatgtctgaccaatgtaatgctgacgcttcgccaattcgcataccagtcataaataataaccagaacgatataaacagataatgttcataatagtctttcttacagagtaaggaaataaccttttgaaattcttctaatgtccagaaatcaactttggttttcttgcttttgatattgcctatcatacgagaaggatttttcttcgcaattccaagaacaatagctctgtcaaatgcgatagaaagtattccctgtacgatacgaatgtaattagggctaaaatcttttgcaagtttcaactgccagttttgaacatggataggttcgatttcgtctgtttccattttgtagaaataggaaaagtgtttcttgatggtagtagcacgattaagaaaagtgctttcttaatagggtcttttgccatgatttcactccttacatgatatgcaagaagtacaatcaatcgtttgtgtctgataatgtaatccctaataattcttccacggcttctttgggtactctgtccaatttacgggattggtaataagtatgccctttttcaatcataagtttttttgcttttcttatgatgtctgccgatgtccactcttcaatgaattatcatacgaatatatcttcaatactttataattcaagagtaataataaggctattggcatgtacttttgcaacaatatttccgccaagaatggcaacaagtgtttttactaccgcaagtcccaatcctgtacttctattatgtcttgatttatcgcctgtataaaaacggtcaaaaagtcgattgcaatcaatttctgaactgtcactcattggattttcaatggtaaatataatattattattttctttctccataagtgttatttttatcgttccaacagaatacttaattgcatttgtcaatagattttgtaaaattcgttctaccatatttttatcagaatatacgtatattgaataatctgggagatttatttcgggtaaaatattctccttttctaatgcaacggcattttccgtaattaaatttattaacatattagatatattaaacttttctttttctggaactgtctgctgttcctccaaaatagaaaggtcatagaatgtttctaccaattctttcattttttcggctttgctaaaaatcacttttacacgctgtgcttgactggattccaaattttctttttgcaataattgtaaatgaccaagaatgactgtaagaggtgtacgcaaatcatgtgatatattagcaacagattcttttaaatactcttcattgcgtaatacgcctgcaacagcctgtcgttgtctgatattatattgattcaatataccagccagtctttctaaatctttatcaatcaacgaaatgtctaacatctgctgtgaatttccagaattcaattcattaacttgatccgcaagattacggatttgtttttttaattgaatatatcgaaatagcagtattactaaaaatattgttatgataattaaaatccattctatgttagacattttctccacctatttaaaatcacatttacgaaattttatccacgaaagcaataccaatataccagaccatatacatcctactaaaatagctatcggttgaaaaaaggttttcatgctgacaacgattctgatttgataagtaggtaaaaaaccgactggtaatctcaacatcattccatagccaagatataagctaagaccaaaaataataattactgtaaccgaagttgcttttacagcatcctgtaaatagcaacaaataagtattgcaattagaaatatcgcactattaagcagacaagaataaatgattgcttttataatattgtaaaaaaacattcccacgtctgcaacaccaaagcgtccaaattcccttatgcaccctgaaactggatagacaagagccataagattaaaagcaattaaatacgatattattttacttgtaaaaatttgttttctggaatgtccagcactgacctctaagtttattgttctcttagaaaattcctgtcctaaaatcaatgcaagtatagccgacatgatgataagaagaaacgtagaatcatacaccattccattaaaaatatcagcaagagaagaagcaatttcttctgtcgatcccatgacctctgtaacataagtatctgctgtaaaaaatcctaaaataaatattccaatcataccacaccagtaaatagaattatgtaacaactgatatttttccagttttaataatttatccataaaaaacacctccggttatttcaagtctgtatgtaaaaaagcactacctgcaatgaaatataaaataaaattccataaaaaatctacaaacaagcaaaagtttgtcgaatagaccttttgcaatgaaattaacctaagttgtcccattggtattattctgctgattatttgtgcagattcactgttcagcaaaaaaatcataacaaaaaataaaaccattgaaaacatcggtgtacaaggggtacaaacaagataaaatagaaatgaggggcgatagagcggaaatgtcagattttccactctatctgaacacggtcgctggtggccttgatcgtagagatcaaaccatcggcggcttttcttttgtcgtcaaaatctatgctgtcccagttgtcgagataataggacaacttctttatctgctggggagatatggtttcaacgctcaattcggcgattgcctttgaaatggtctggcgtctggtgtccagttcttcaatttttttgttggcgtaggcaagcaaggtcgcattggctccggtcagcgtatccagcagcttttcaatttctgcctccacctgtgccagctccacttgataggcggtcagcttcggattgactttttcctccctgccgtggagtatctgaaagtctttgaacttctcctgcatggccgagaaaatgaattgctcaaattcttctttgcggattttcccgcagcccggacagcctttgttttccgtccgtttggtacagcggaaatagccggtgctgtttggtacatgggtggctttcagagcatacccacaatgaccgcatttgatttttccggccagccaagtatttttcggtttccgtccctgctggaaggtggtatttgccataagttttttccggcatttcagccatgtgtcagaggaaatgagtgcttcgtggggagcgataacaagtatctggtcttttaagcacctgtccttgtcctctttcacatcccgcccctgatagagatagcagccgtttgttccagcaaagtcagaagcgtcattcacaatcgctgcaccctggctcttgaaaaattcgtacagttccaaatcggcctgtgcgtaaacggggtttcttaaaagctgggaaagaaatgtacggaacatggatttgccataaatttttatgtcatgttcctcgaagtatcgggtaatatctccgaaggaggtttccggttcagcgtacatttcaaacatcagccgaacatggtcggcggctacggggtcggcaaccattttctttgtgcggataccctctaccacagtaggctctaactgataaccgtatggcgcctgcccgctcatgtggaagcctttcaggcaccgggaatagtaggcgtctgtgacacgcttctgaattgtctcacgttcaagctgggcgaatacaatgcagatattcagcatggcccggcccatcggggtcgaagtatcaaacttttccgtggaggatacaaactccacatcgtactcttgaaacagctccatcatcgttgcaaagtccagaatagagcggcttatacggtccagtttatacacgatgacccgcctgacctttcccttgcggatctcgcccaacagcttttgaaactccggcctgtccgtatttttaccggaatagcctttgtccttgaatacccggcagctcccacctttcaattcatacttgcaaaagtcgatctgactttcaatgctgatactgtccttgcggtctactgactgtcttgcgtaaatacaatcttctctgataaattccatattgggctcctttccttgttggaatggagctaccaaccttacaactatattataccatcagcagccccggacaacaatgttgcgaatgattagggaaatctgtccccatattttctgaacacctcataaagacaacgctcaatttcttttttgcgctgtgctttctccttcgggggaagtaccggcgtgaggctttccagcacaatgatcttcccttgaaatgcgacagactttgtttctcgttcataagtgacagcttgcgtcattgaaaacctcctttgcgaaagtgcgtgtatatgcctgcctttcccacttgtcccgtggggaaatgtcaaaagacggcacccagcaggtgccgccctttgagctttctccacttcgggtcaatgtggcccgaggtcagtaaggactggaaaggtacttttctttggcgtcctccacgctgttgaggtcgaatacttcataaagctgccccacaacacgccgtatatccttctttgaaaatccgcagtcctccattgccataatgacataaccacggcaggcgtcattgctccattcgtccggttccaagccggggatcattccaaacgcatttcccataaagtgctccttttttgaaaagatggggagccacgccggattggttggcctatcatcagacagcattgccgggggctccccataggttttcacttcatttcagacacaccggacgggcataggcttcatgccccatagtatttcaactctccccattctgatggcaaggcgttctcattgcctgcgacggctcacggcttgcaaggccgcttcaacgctcggactgtgactaaacgcaagtatccgggttctgcgcctgttccggtggagccagccttgccccacctatggcatggacctgttcgctcgctcagttttacaaagactgtattctctgaaatccgaggtcatggcgggtctgtcacacagcgcgttccccttcgtatccgggtgtctttttattcaattttcaatctgcatgaggcttgtctgaacctcgggccattgtgacccgaagtgttttgcctctcataagccatttcattttccggcctaaatcggtacgccttacaaagaatttttcaaaattttttctaagcgccgcagacctcgctcgattgcgacacgaaccactttttcatggacgccctctgcccgggcaatgtcctgtttggtcatgccgagaatgaaatgagcataaatccgttttgcctgtttgtccggcaaactggaaatcgctgcgtgaagctcctgcatggtcactttccgctcatacagttcatggggcgataaggcgacaaagacagcttcgtgctccagcccgtcgtcccgatcaagggaatagtaggctttgtggcggtatgtacgcagccgataagcagcctctttacgctcaaactctttgaacatttctgcaacttcttccgatacttccatgaagcaatccgatgtataaaatgggtaatagtcccgcaaattgataatagccatattgacctccgtttcggttgttggttgacgagtgaccgaaacgaaggcggcggggagcggcaccggggaatggcttcgggccaacatgacccgaagccgccccataagaacgcaaaagcgcccgggcggcatgaagccacacggacgcatgaaatgacataatagttaaggttccaacaaatttcgcatacatagccggaataacccggaggcggggctatgctttttttaactgatgtaggtcatgggcactgtgaaaaaaggcaaagatagacacggcggcaatcctcctatatgccgccgtggatttacacggtgttaggtcgtcgttggtttagggggggggcgaaaagaaacggcggctctgatttctcaaaaccgccgtatcgtcagtgatataggaaagcacacgaaatcctctgcccgtcagcggtttttttcttttccccgctgtgggggcagatgtttcttaattgatttaccacaagcataaactacaaatgttacacaaatgtccgaggcgtctttgatttcgacagaaaaacaggctgaattgttacaaagctcggacatttcaaaaatttctttgagaaatgacgaaaaaagcggggcagcacacgccgccccgccgatcccatacggttattccattgcccgcatttgttcaatcagagattgttttttctgtctgcggattgtccatacagacaagattagctccattccgaacaataccagaatgaacagccccatttccaaaaccgggaattgataaggcactacatttccggcaaaagcacctacactcatttttctgcaagcaaagatggaagccggaagcccaacgatcagcgttgccaatgttgcaaagagcgcatagcacagcccctcacagatgttcattttacatagctgtttttgtgttaggccgatagaacgcagaatactgttttcctgctttcgggcgatctggttagagagtgtcgtgttaatcaggttgataacgccaaagagaaataccagccatgacagtacctccatactgccaaacgcaaaagaatttgtcatttcttcatattcaatcactgtattgatttcatctaaggcaatattactatggctggcaacaatatttttcaattcagctcctacatagtccgtttttttagggtcatttacaatgctccatgaatagtcaaaagaggtgatttccgggtgcagttcgtggaacaacgcttctggtgcaaaaagagttgccccatctaagtgcatcctgccatgtcctgaatatacctttgcaggagcgtataaccccgatatggtaacagaaacggatggctgttcttctcccaaagaaatctcaaccgttgaaccaacacccatatcctcattctgctttagcacattatagtcaattacaatactacgggaatctgttggcatggttccctctgtcagagccgcttcaactaccgcataattctggtcggtcagcatatcgcacataccaccagcttgatgaatctctgttttataagttgcatggagagattgcctgcttggaattatatctgtaacgccatcaatagataagatttcctgctttaattcctcattcaatggatttcccgctgccataaccttttcttctgtcatttcagaatccaaataaattttatagtcgccgtctgggaaaaactgtcttgcaagcgcctctggtgagcgcagcaaaacaatggaggataccacaagcaggataattccgcccaaactcaatgaggctacaatagcaacggtcttttttcggtcacgcctaaaatttgcaattcccattgaaacaggattgagcttgatattctttttccggctgcggatgtccttttgcgccggggtaaaatggacggcttcaatgggggaaatccctgccgcaattttcaccggcttacggatggaaacagataccatgatccaactgcttataagcgttaaaataaccgttgccacataggaaacagcgttaaaacccttggaaaacaggaggaaaccgccgcatacgcccagcactgtgccaatcagaatcccgatactgccgagtttgcgtccctcgttctttacaatccgcttgatttgctttggtgtcgcaccaatcgtccgaagctgcccgtagctttggattttgtcattgatggagatacggaagatactctggatcacaatatagccgccaatcagaacaagggcaatcacacctgccatcagtgcaaaatcaaaggatttagaagcataggcaaaatacttactgttcattttgggcataggaagctgatattcctctgcaatctccctgcaataagaggtcatcagttcctcacccaactgatcgctgtttttgaaatgggcataggcgcgatagccagccgggtcaaactcattccattctgttagggcagctttggaaagaatgatcgcgcaggtattcgcttccttttcatttacactgttcataatgccggtaacgacataatcaccatgaaaactctcggtgtctaaggtcacagtgtccccgatcttggcattgtttccataggtggaaagaaagtatttgcttacgacaatttcatttgctttttcaggaacccggccctctaataactccatctgcgccttggtaatctccatcatttgtgtgtcacaatacacataggacgcatgatagccctgttctgaaagttcctcaccgagcatatagtagccgcctacacgctcaaactccggcagtcctttcagggtttcaatgtcgttttcctccacgcccagccagaccgcctcataagtatcgacaacctgattgcgctgcatttgtgtcagggaggtagacacaattcccgtaaagcagattagaaacgccgccagtgcaacgacaatcaccaccatcagattccggcgcttctcgctttgcaaacttttctttgccagcttctttgtaatggcgctggtatcattctcaaaaggccatgtcatagcctgccacctccttactccacaatcttgccgtcctcaatgcggacaatccgatctgcaaggcgggcaatgtcgttgttgtgggtaatcatcacaacagtttgccggaactctgcactggtgcgcttgataagccccagcacctcggcactggtcttgctatcaaggttgccggttggctcgtcggccagaacaatagccggtttggtaatcaaggcgcgggcgatagccacacgctgctgctggccgccggaaagattgttcggcatatttttcagtttatcttccagccccagcaggtgaacgatctcgtccaaaaacttctgatccaccgtgtccccgtccagctccaccggcaggacgatgttctcatacacattcaggataggaacaaggttatagttctggaagataaagccgatgttgcggcggcggaagatggtaagctgttcgtcgttcattttcgacagttctttgtcccggacaatcacattgccggaagtaggggtgtccagcccgcccatcatgtgaagcagggtggacttgccgctgccggaggttcccacaacggccacaaattcgccgtcatttacagagaagttcacgccgtcaagggcgcgggtgatattcggctctgtaccgtaatactttttcaggtcgatagtctgtaaaattctcataaaattcaatcctttctttgtttgttgtaaatgcggaacgctgctgcgccggtggccgccaactgtaccagaatcagcacagcgaacagtccgaagctctcatagtagaacagttcatcccaaaacaggagaacatcgcagagggcagtcaaggcaaccgtccagcggatgtgctgggccagcctttgccagaacgccagcacaagggcaacgggcgggacgatcagcagcgccagattcaaaatcatggtcggggtcagttccattgcaacgcctcctcacttttgttgataaggtcattgtaaaacccaaatgtctgcgaaatgttacagcggccaaaaaatttcatcgaaaatcggggtgaaatgttacaacgctcggacatttcaaaattattattcaactacccttaatcgagctacaatacttgtttttctaaaatagcgaaacgaaacatgaggaactataatcgccacaacgcaaataacaattccctctaatatcaacgggaaaatcgtaggctgtattgtaaacagccataagtcaggttgattaaagaaagtaggaagaattgtatttgcaacaataagagagagaggtaaacccattacacaaatcagaaatgcgtaaaacaatccctccaatacggtcaatttgttaatttgttttttcgtcattccgatgctctctaatgtagcaaattcccgttgccggtttataatgcccgttataatgatgttggaaaaattcacaagcccgatacttcctaatagaaacccaataaggccacctatgataaaaatagtttgttttaatccattcatagtttgtgccaatgtttcagacgatgcgtattcaacggtaggcaaagaattgatgtactcggtcgctggcaaaaagtgttctttttccacatcaaacacataactcattatggctggattgttatacaattccacaaacatctcattactcatatagaaaataggacaatcgccgccaacatcagtgtagccaacattcttacccggagattctaccaatgaaaaatcaaccactgcacgcgcaattaccgaaaccgttttataaggcaatccatctttgtaaatggtaacttcctgattgagcggacaaagaaattcaggagattcatttgggttgatcgctgaaatttctataacatagtttccactttccaaatatgaggttagttgctgtatatctgtttctccctcaatgaaattcaatttaggaagtattgatttttctaccccgtaaatattgcaaagaggtcgataatcaacaccgagttttactggataagttctgccatcaaccataccacttcgtataaggtgattatcttctgtgtattcgtctaatacttccgtgaccaaactaccataatcataagtaacactgacatcatccaaagtgtttttataaattcgacttccgttcagcacaggaatattattttcaatatcagatatgatttcattactaacagaatcatctttaaatcgaaaaccttgcacattagaaaatgtgtttgggcttgccacaacaaaatcaaatgaggtaacagaagatacatattttttaacatcaacactatttccgattgcgattgcactgtttaggagaataatgcagagtatcatggataagacgataaatatggtacgctttgaatttcttcttaaatttctccatgccatttctattattctattcttaaacgaaagacgattcttgttggcactatgataattgtctttttcatagtatctggttgcctcaatgggcgaaatcgtagctgcaattttgaatggtttctttatgctcacccaaacagtaatcgcactaaatatcccggcaacgacaaaaataataggattaaaactcaagttcacagaaagattgtgatactcgcctttcataaaattaagaatccacggaagcataagtattcctactatatatcctaaaatcaacccaatagatataccaattatagacagccaaaatgcttgcttataaacaattcgcttgatttgcttctccgttgttccgattgttcttaataagccatatttctttatttcttgaacaacagaaatctcaaaaatattgcgaatgagcaaatagcccgttattacaaaaatcataataaaaaacagggctgctattatggcaatccaatttacagatgtaccagtggatgggctggttcccctaatttgcaaaatagttgtctgtatagactggatcgctccaacacataaagtcgttacagaagtaaaaagcattgatgttaaaacgattgctattacagcaacaatatttcgtaatttgttggctttgaagcttctttgcgccagcttctttgtaatggcgctggtgtcattttcaaaaggccatgtcatagttgtatcacctccatatttgataagggtattgtaaaacctaaatgtccgcgaaatgttacagcggccaaaaaatttcattgaaaatcgaggtgaaatgttacaacgctcggacatttcaaaaaaatttacggcgggcagccggaaatggccgtccgccgcgttttattttgtcggcagcataatggaaaattctgaacccttgcccggctccgaaaccactttgatatagccgccttgccgcgttacgatctcgcgggccagatacaggccaatgcccacgccctgctgttcgtgtacttcttcctcacgatagaagcgccggaagatggcagcctgattgctttcggaaatgcccttgccggtgtcggtcactttgacctccacatacatttcccacagcaccactgacacggcgattttcccgcctgccggggtgtacttcactgcattgtccagcaggttaaagagggcttcggatgtccacttgctgtcatggaaaacggtcaaatcctccgggcagtccacggacacagcgatttcctttttctccgctgcatacacaatcccactcatggcctgcgccacggtatcaaagaggcgacccggtttcttatccaactggatcacgcccgtttccagccgtgaggttttcacaagggcctgaaagagaaagtccagcttatccgtctggctgcggattccccggataaagtcgatgcgctccgcctcggtcatgggcttttccagcagggtgtccgtcgccattttcagattgcttaccggcgttttcacctgatgggaaatatccgatacaagggtctgtaactcctgccgttcctcgtccacccggcggcggttctcctgcatgatctggtaaagccttgccagccggtgtccgattctggcaagctgggtttcgctgtcctctggccgctggggcgcttcattcccggcgatcatgtggtctaaggtctggcacaggtcagcggtaaactgcgacagccgctttccaaacgcctgcgtcagtacaaaaattcccacaagggcgcacagcagcagcgccccgcccgtcagcagcaccgccgtctgttttgtcacaagaaacagggctatggtgatcccggacatggagaggacaagccccattgccacccggccaaacagccgctttatcgagaggttttgaaacttcattttgcctcgcctcccgtccattgatagcccatgccgtaaacggtcttaatgtagggcgcgccgccgtcggattcaatcttgctgcgaatccggctgatggaggttgtcagggtgtgttcgtctacaaacctctcgtctatatcccacagcttttccaaaagctgcccacgggtcagcacttgccggggatttttacggaacaggttcagcattttgtactccatcggggatagggtcaggggcttgccgtttaaggaagccgtctgctccgaaaagtccagaaacagccgcccgtcgtcgtaaatatccttggccggtttgtggtgttccagcatggcgaacatggctttgatttttcgctgcaaggccctgatcacaaagggctttgtgatgtagtccaccgcgcccacctcatagccccgtatatggtcgctctcctgatcgttggcggtcaggaaaattacgatagtgtccgggtgctggggctttatcagcttgcacagctcaaaaccgttcccatctggcaggttaatgtccagcagcactaaatcaaatttccgctggcggatggcgtcggctgcggttctggcatttagggcggcggtcacgccgtagccgtctgcggtcaggttataggccaacatcttattcaaaaaactgtcgtcctcgacaattaaaatctgcttcatatcctcacttcctttgctttttgcagatagtataacaggcaaatgtccgtgaaatgttacagcggacgaatttttgaaaaaattatttcttcataaattatatagcctgttggcttttacatcaagattttacaagtgaatagtgaaatgaaatactaccttacataaagtttcattacattctcataatccaaccagaaatgtacaatgatatagggtgatatgagaatgaaccaagatgaaagaaggtttgactttcacggcctcggggcagctctcaaaagagccagagaagaaaagggctggacacaagcctacgttgcggaattagtagaccgtgactcccgtaccattatgaatattgagaacaaaggtcagtatcccagcttcgacctttttgttaaactcattaccatgtttgacgtttcagttgaccagtttattcatgcggacggaggggcaaggtcaagttcttgcagaaagcacattgatgtgctcctaaattctatgaatgaaaaagagcttgttgtaatagaagccacagccgagggcattaagaaagccagagaaacggaggttccagaatatgatatgtacccagaattctggacacatgaaaaattgaattaggtgcacatggatgcctctctgaattttgtaggaggcatccattttgttttctcttggattctttcgttgttgtagtaatttatgtagctgtcaacagccttggcaaatgtttcaaaagaggaatactctttttcatgcccgtagaacatctcatttttcatccgtccaaagaaagtctccatgatgcaattgtcgtaacagttgcccttccttgacatggattgaatgattttgtgatctttaagtgcctgcctgaagtacacatgctggtactgccacccttgatcagagtgaaagatcaggccatctacagagggaaactttgtaaaggcgccggccaacattctctggatctgttccatattggcactttgagataaatcataagaaatgatttcgtttgtgttcatgtcgagtatgggagagagataacacttcccccacgaaaaaccgaactgagatacatcggtagtccatttttgcataggagctgtcgtgctgaaatcccggtcaaggatattctcagcaaccttgccgacctcgcccttgtaggaatggtacttttcctttggacgctttcctgccaaccccatagtgtgcataagccgttgtatccgcttatgattgaccttgtggccgcgctttatcagttcctgatatactcttcgcacaccgtagcggcctttatgctgtgagaaaatgtctttgatttcatctgccaagcaatggtttcgaacggcaacttgatcggccttgctcaactcaaaataataggtagaccgtgccatctgcatagatttcaacagatatttcaattggtatcctttttcacgcagctctttgatgatcgctgctttctcgccttgagttgcgctgcgtgcctctcttctctcaaggcgatctctttttttataacttcattctccgcctttatatactcgttttctgcccgaagccggatcaattcttctcgttcagattcattcagtggccttgcttcttcctttttcatttggggtacccctttacttggacgaccttttttcatttctaccaggccattatacccctttgttttatagttttgaacccattgatacaataatctatcttgaataccggcctcgattgccactgacacacaggattttccggacattacttgggatactagttccagccgttcttctggtgtccagttcctgttgaaatttttgtgtttcagtgcttctggaccgcggctatcctctgctcttacccatagtctcactttatcccgaaaggatttattgctaacaccttccggcgtttctggccattttccttctcgatacagttctacacatttccttttgtactcatatgtgtaccgcataataataccccctctactgggtgtccagtaaagggggtacatatcaataagggcctctgtttttttttgcgccattttagggactgccgctaagtggcaagcaatgcctctgtggccacaagtggcacaaaggcggcttgttggggctcgccccaaacccgtatcttcgggccaacatggcccgaagtgtcagcgtcgctttgctccttattttcataaccttaacgctccttttcctgctttcttcccggctcggtgtagcccatcagagtgtcaatgttcgccttgatcgtgacgatctcctgcatatcccgtcgtgccttctggtattctccatagagctgttttttctttgctgtgagcttgcggtcttcctccttcagcacatccattttagggagcttcgccccgcccagcagagagcgcatttccgcttgtgcagcccggtacagttcaaggccggcctcatgctccgcaaggaatttccgactgtacttcgtcgccttatactgctcaaagactgggcgggttttggcatactgaaccgttgcggcctttagcccggcattggttttcatggcctgttccgtctgcttgacctgttcggaaataacatggaaacggtctgccgcctcggtagctttcttcgccaactgctcataatcggtcaggttattgtcctgtatataggcaagagcggcggccatctgcttaatgttaaataccttcgcccagcgttcatatcccggccccttaccggcagccagctttgcttgaatatccaccgccagactgattttccgctccgagtgcccggggcgtttttctttgccctcaatagcggacagaacatcttgcaagtcgtagccgtcccccagcgtggaggcacgcagacgggtgaagcgttcctgtccctgcccggtcagccggaagctgataccgccgccccgaaccgtcttgacctcatacccggcccgcttcatcaaattgagaaattcgtccaaatcagcggggcgttccgccaacgcagtatcaatggcaaggcgcagcctgtcctgataggaaagcggccctttccggtctttctgccactctccatagttccgatacttgcccttgctccggggcttcgggttctccacgatggatagcccgttttcaaggcacagcctgtcagagagccgccgaagggcgaagctggagccccaaaaatttcggaatttccgggtgcagtcaagggtggtggagttgtaataaatgtgacaatggatgtgctgcttatcggtgtgcgtggtaacgataaaagcgtgccgcccctttgtccagcgcatagccagctcatagccgatacggttcgcctccttcggggtgatctcgcccggatagaaggattgtcgtatctgatagcacagcacattattttctttcttctgttcctggcccgtcatagcggcatagctggcctttgccaaaaggaactcgtccgccacggtggccggatcacattcataagcggagatatactttccgctttctgttttctccgggtccttgccatagtccagacaatcccggatagcctcagcaatcgtttcgccttcgcccgcatggcgctgtaacaaagttgtggtagccaaaaatcattcctcctttccatgagaaaggggcggcccattcagaccgccccgacttcgggtcagtatggcccgaggctgcttaacttgccagaaaccggtacagagcggatttgcctccgtccagcgcccaaagaagggagcccgccgccgcttgcagtccatacggcgaaagaaggaaggcaagaaacagaaatacaatcccgcctatgggcgtcggcgtgaaaaaaagagcgacacccagcaccgccaggatcacagaggcaatcgtcagcaggacggcacaaatctcaaacagaaacaccagcagagccgccagaagggacagcgccaaagcaaagggagcaaccaatattttcagcagtatcttcatcttcaaaacctcctttatctatcctttctacctctattttatcatgcctgcccggggacataaatgttgcgaaagattagtaaatcctgtcccaaaccttcgggtcatactggcccgaagtggtaaaaaaagagcagggcggcaagccctgcaacggaagcctgccgccctcgtcttactttgccaccagctcggagagctcccgcaacacctttgacacctcgccccacagcttttcatagtcccgcttcaatccgtcgatttcctccgggtacacgccataggtgtgtgcgtgtatggcaacctgattgagattgttagaacagcgccgttgcagagagatcagctcttttacgggcgcaaggtcgatgtgcaggatatacccattcagagccattttccgtacataagccccggcgttggaaatgcccacctcagccatccgttcatggatggctgccagctcgtccggcgttaccatgacgtgcagatggacattccgcttgcggttctccatcagcgttccagctcccggcctttccggcgctctttgggctcctttaccttgtccagcggctttgcgtccagctccgggggcgtgggtgggatgggcgtattgttgggtacgccgtcgatcatgttgcagttctgctccgtggagagctcggcggttttcagatagttgtctttttcgtgcatggcgatcctcctttatcgttcctcatggttttgatggctccgcttctggccgggctccttcgggggttcctgccctctggttccttctttgagccgggcggtaatggatgggcgcacccggtcaggattgcccggtgctggtttcagttcataatcctccatctgattttcggtcagcggctttgcgtaggtcagttcgccccatgccatcagcctgccgtctgccacaggacgccgcctgtcatcgtcgtagttgacaatggaaagaggctggttatccggcggcttcgggtaagttcctatgtccacggggcgctgggtggaataatagcggtaaacgccctccggtcccagctcggtatgcttgaccgccgcatggtaaagctgctgatagtcgtccacccggcggtcaaagtccctctgcgcccacgcctgactggttccatagcggccccagtagtaatcccgatggccgttttccccctcggtaaactgccaggtcacaaaggggctcggtgctcccggattatgccccagcgcaaagccgtgtccggtttcaaaggtggcagctttcaaaatcacatatccttgtactgtctccaagagatccctcctttctgtgcctcgggccaacatgacccgaagtgctggatgttacgaaataagagggcagaccggggaggaatgtaataagatattcccaccccggaaacaccctcaaaaaagcccggaatgtcaagcctttggaggcggcaaatcgtaacagccgcccggccttttctcccgcattttcctcatgcgttcccggcttttccggcggttcccttcggccttgcaggcgtcggagcagtaggcttgacgcccctcgggcaaaaatgcctttccgcagaccgcacaggcccgcagctccggggagatgccttccgttgtcagcgacgcttgaagctccgggttaagaggtaggacagcctcacggaaataacggcagtacgcccctgtccagcacttgtgcagcatatagcaggcacagtcaagaggaaggcacaggccgctttcccggtcatagttggcgcacatccccgtgaccagagtgcggattttcttcttctcgtcacgggtcagctcccgggcgtccatttatgacttcgggccacgatggcccgaagggcgggactccacgatcagcgcccggaacttcttccggcactgttttttctttcctttgcactccttgtagtaacggcatcccttacaagggtcgtcattgtcccagccggggtgcggtacttccttcatcattcgttcaaaagggctgcttgtaaaattcattctcattcctccgtatcttcctcccacggcggggtatcttcgtcctcgggttcctctgcgatttcctccagctccccgtcctcatattcgcagtaatcatcttccaaatccggggcctcatgcttcggcttgtaaattttgaaatagtaaccaattccaccaccggccagcaccaccgcaccgatcaggagcagagagagaagggggctgtcctttttctccggctcgggttccggtacttcctccaccggttcggtgggctttggctctggctccggggtcacttctttgggcggttccttaccctgttcggcaagaggcagaaggtcgtctgtggtaacggtattgaggaaatagacgttctcgctggttttctgtttgtcgatcaccagataaaacacgctttcgtctgcggtggtgatggtgtagaactcctttccatcctcgtcggtggcgttgtccaccacggttcccgtcccgtccggggtaaaggggttctgggtttccggctctgcttcggtttctgccggagcggaagctgtctccggctgcggctcgctgctctgtgcataggccgggaccgtaaagatcaggcaacacaaaaggctggcagccatcgccgccagcctgcggtatttagttttcttcatgggctgtgtcctccttttcgggtgcctccggcttcgggtcagtatggcccgaagcggtaaggctgtttttggggtcgttcagaaaagccataagctgggcgggcgtcagtttgagggagcgcaccgcctgcacgatctggctgttttcttcctcctgtttctgcttttccagctcccggattttggcctgccactcggctgccttctcccgggctttttccagttccttatcgagcttgtcgatcttgttcatgcaaggactcctttcctctggctcacaaacgcccgaaggcatagaaatgtgtctgccagtagcttgaattgatgtttgcgtattggatgggcgaaccacaatggagcatcatcccgtcgcccacataaatccccacatgggatacagggccggggctgtcataggttcccgtgaaaaagataatgtcgccgggctttgcctcggagggggaaatgatagcgcactggttataaatgccctgcgccgtggtacgtggcaggttgtggacgccgctggccgtgtacacccagcagacaaagcccgaacagtcaaaggaggtggacgggctggagccgccccacacatagggccagccgatgtactttgtggcttcttccatgagcgccgcaaaagccgggtcatccagcgcctcgccgggtatctcatagctggggccggtatcttcgccgccgttgtaaatcccttcccacagatagggcttgttgcctttgagctgctgcataacggtgtagatttcccgctgctgttcgttaagcctcggcaggatcacggcaggcagcgttttgtttgtgagggtcacatttaagatgtaatactcataggggactttctcggtggtggtttccccggtctccgggtcagtgctggtttcggtgcggtagcgtatctcaacttcctccgtcaaggtcagttcatactgtgcctcgaaaatctcccgcagttcgtcctgcacctgttcccggaaatagacatggtactttgcagagaaataggatgccagctcataggggttatggccgatctcgtccacggaatagcggtactcgtcatagccgggatgggtgctttcaatgttcgccaccgtctgcgccagctcgttttccaacgctgtatagtcctcgtccacccccagcaggtccgtatcctccgaggcgtaggaggtgccggataacgcattggcaaggccgctgccaagcgtggggaaaatggaacttaccgccgacacaagaaaacagagcagcaacagcaggagcaggaccagcaccgccacgggatgacgggtcacaaactgcgccgcccgccgggtcgcagttcccgaagcggcagcggttttctttgcggcctttgcgccctgttttgcagccgcctttgcttctttggaataccggcgtttcagtttccatttctgctgcacacgggaaagcggattgctggcaagctccgggtgctcggaggccatcttctgaaaatccacattggcccgggcttttatgtccttccgttcccactttgccaccttccgggccgggtgctcctgccagcggcgtttggcataccgggtcagtttccgggctccggcctcggccacaagttccgacttatgggctccttccacacccacattttcatgctcaacttcgtggatcttgttgtggacatagaaccatgcttctgtacgggctccccggacagctttttttgcaagccccggcggcttcttcgctgcccgttttgcctcggtcttgtccagtttctcccgagcctttcccagcttttccccggcgtgttccgcttttgcctgtgctttctggtacttatcctttttgctcccggccttctcggcggagccctccggctcctgtgccttgccggtatcctgcggcccgcccgcttcatcctcctgcctcatgcggtcagagggacggcttttccggctgtcctcttgaaacttgccgcttttggacttcgggccatcgtggcccgaaggactgtcctgcccggtatcctcgtcctcaaaccgcaggcgtcgggacagtgcgggggaaggcccttcccgttcagccggtccggggcgattgctcccggtctcctccgtcggctccggcctttgaaaattccgtttatccggtttctttccgatgatgtatccctcctttccaaacctcgggccagcatggcccgaagtgtgttatgcccggttcatttcctgttttttgtcctccgggcgggtggtcataatggcgtacagctcggtattctgcgggaagcggtcaacaaacgggatggtggtgtttccgaagaacagcagcccttcgccggaattggtatgggtcacataggaaagctgatgggggctgatcccaagctgtttggctaaaatctgccggtccccctgtgcctgcgagagaagcacaaggaagtctgagttttcaaagatgttctcgatctccgggcttgccagaaaatccttcacgttctgcgttaaagcactgggaacgcaccccttttttcgcagcattttccagatcgccacacaatagcttgccgtcagacggtcacggagcagcacatgaaattcgtcgaagtagcaccatgtagcgataccgcggaggaaattcatggacacctgcgagtttaccaagtcctgcataatgagcatggcaatcgtccgaagcccggcccccagcttttttaagtcaaggcataccagacggcggtttaagtccacattggtttcatggttgaacacgttaagggaacccgacacatagatttcaagggcagttgccagccgtaccgcctcgccctccggctgggaacagagcaggtcatacagggtttggagggtcggcattttgcttgtttccgggtcctgcaaatgttcccggtacatctggcgtacacagcggtcaatgacggtccgctccaccggctgcaagccatccttgccgccaacgatcagctccatcagcgacaggataaagtcggctttcagcgccatcgggttttcctcgtcaaagcttaggtcaatgtccatcggattgatgtggtgggggctgtccggggcgatctcgatgacctgtccgcccagccgcttgataaggggcgagtattcgcccatcgggtctaccacaatgatccggtcacgggtggcaaggaacacgttcacaagctcccgctttgcggcaaaggatttgccggagcccggcacgccgaggaacaggccgttggggtttttgagctttttccggtttgccatgatgacgttatgggaaagtgcgttgagcccgtaatagacggcttcgccatccatgcggagctcctgcgtcataaagggaacgaaaatggccgtggagctggtcgtcatgccgcgcttgatctcaatgccgttatggcccagcggaaggctggaaagaaaaccatcctcctgctggaagtccagccgcttcaaggtgcagttgtatttctggacgatacccgacaccgtgaacaggtcattgtccagctcccggcgggtcggggccatgtttaccacaaggaaggtcagaaggaacattcgctcattccggctctgtaaatcttccaagagggtctttgcgtcgttgctgtacgttacaaggtcgggtggaagtatgtccatgtcgtaccctgaccgggctgccttcttttgttcctccaccttcatcttgtcaatgtcggagactttggccttgatagattttacggcggcggcctgatcgacggtttggatatggagagtgatggtcatttccgcatccatttccaaaagctccgccagcagcttgtccgagagctccgaggccaaaatctgcaagtaggaggcggcgccccaagtcgtccccacccggaacagtcggctgaaacgaaaatcgaaactgtccggggcgataaagtctttggtggaaagcccggttttggggatcatatcccatgaaaaccggaagggggagccgctgccggggtggagctgtccgtgaagaagttccagccgttccagccccgaaagggagcggcacttgacgcccagctttttgaagttcccgcaaatgtccgcctctacacgttccagccttgccctggcggtgggaaggtcgtccacgttcacgccgaaggtcaggagctttgtgcggacaatgccgttgttgcttttggcgatctggttttccagcatttccacatactcacaccggacgctgttgtaatcatcgtcctgcatggggatgttcacgctgtaccggctgcccgggcggctccggtggttgaggaaggaaagctggaacggaaggctgctgtcaaagtagttgaggcaggcgctccacccgtcaaagatggccgcctgatcttcggactgtgcgagctggtagttgatgtcctcgtattcaatggttttggtgtaatagcggtccgctacccggcacaccccgtcccggtacatttcccggtaagggagggtctgctgggcggtggtgggaatgttctttcctttcgtgaacaggccggtaaggccctgtttttcaggctttctgcctgcgggctttccggcccttctgctgtttcgcaatcggctgcgcctcctttctggcgctaagcagcgcatagaagttttcggttttgtaaggccgcacacggggatagaggaaccgggtgcggatgatgtttttcagcactttttccagcggcagaccgtctcgttcatacatagccagaaagaagaacgggagcatgaggccgatcatcaggaacatggcggcactgttcccgatactgccacgggaaaacaggtaagccgggaggcccaccgccgccgcgctggaaaaacaaacaagctggcgcttcgttaggttgaaggccagctttgtcttgattttggaaaggtcttttggtactggcacataggccattttggtacacctcctttattgcttcgggccagcatggcccgaggttatcttgcggcctctttggccggggctgtgctgcgggcagcttcggcggcctctcgtccgctctgccttgcccgccagtattcggggtgatactgccggatggactgattgagtttttcttcaaactgtcctttgtccttaatgcggtcagggattttccacagctttttgtccagcagctcccggagcactacgctttcctgtgcgtcctcctcatagcaaatatagcccttgtccttgaagccgcattttttggccgctggggagaggacggcggctacctcgtttgccaccatcgttccgccgtggctggcggtagataccagaaacacccccggacagagggtttcacagctctgcacctcgccccacggggagcttttcggcgcatggaacattccgcccgtccggttccggtccgcctgcatgagcgccgccttttccaagatggccttcagctccggggaaaagtaggcgtattcccgcaggacacgggcggcgtccccgccgcaggcgttcatcaacagggtataggcgtcgctgtccgctttggtacagcggcccagcagcttgccgtcatagtagcaggccgcatcatagctcgtccgtttgcgtggcatgggtttcgcctcctttccgcttcgggccagcatggcccgaggtcaacgctccgcgccacagctgggcttttccttcgggggccgttccgcctttgcctgttcggcagccgcttttccggctttgagctggtcgctgatggacgcacgccccacagagccgcgctccgccatctgttccagctttgcctcataggcttgcagaacagcggtgttgagctgttcccggaactcctttgtgacagggtaggccatatcccggtagccgcctttgccgtctggctggctgggcatcccaagaaagagccccttgctgccctgtacgattttcagattttccaccacaaagcagtcattgaatttcacgctggcaaagcccatgaggtttttcacaggttcgatgacccgcacgcttacatccagctttataggggcggctggtgttccgcccgcagttttttcctgcatggatttctcctttccgcttcgggtcagcatggcccgaagtctcttaatggcagccgaagatggattttgcaagactgcctgttttgaataaggtaaaacacagcagcaccgtatatcccacacagccccagatcgccccgatggggtcgccgtcggtggcgatactctggatcagcaccgcatagatggcgacacagactaagatcaatagaccttgaaagcccaccgcaaagagggagcggaaatagttctgccccatgtgtccggtttccctgttggggactgtggcaaacgggataggagctaaacttgtgagtaaataaatttcaatcatacggccatatacgatgacgaagatcacgatgtttaaggcaatcatggtaagctggattaggaaggattgtagccagagtccgaacagaggacctaactccatcgcctcaagctctgtccgcagactgtccagcacatccggcgtgatctctgtcccgttctggataatgcccgctgactgctggatcacatgctggctcatatcaaagactgccagcacgatattgaaggtattcgtcaggatcatcacagccacaaaggttttgaacacccacttaaaaaacatccatgtgtcaacttcatggaggttgttgcgttctatgagcatctgtatcagttcataggtcataacaaaagtgaggatgaccccggcgattggcagaatggcagtttcggagatctgtcgtatcatggaaaagaccccggcgttccagtccgccggggtcgtgcctacctgtgtggcgatttcgccaacgctctgattgacgttatcgaaaaggccgtccagattccccatgataccatcgacgagcagacctttcagccattcaacgattgcgtcgatgataaagtccatatatcagctccttttctggaaaagggacaacgggtgacatttagctgaacagcccggacagcagagggataagctgaaggccgatcagaacgacaccgccgcccgccatgagctgcttaatgccctggctttttgccgcagggttgtccgacccgtaaccttccagaaggttgatgacgccccataccgccagaccggcgccaagagccatgaccagaattttgagaatgtcgattgcctgattgaaaaattccatatacgttcctccattttgtttgtttgatggttttgggtacaaaaaaagccgcccacatcggcggcgcttcgggtcatcatggcccgaagttacacaaactcgtcgctgtccagatcatcgaaattcaacaggtcagcttcttcgtccgtgtcggagccgtccacttcgtacaccgtgtattcgtcctccggctttagtctcaatggccggtggcggaacaggctttccaagcggaaggcgtttttctttttatcaaattcggctgtgtacttgtaattcgggtgctttttcaagtcatacttcggggacaggaaaggcgggagcccccgaagctgcaagatacatttatctccgggcatggtggtgatctcgctggtggtcatcagctcccggccaagccgctgcatattctggctgtaactttcagactgtccacggcttcggccctcggtctgcatagagatggtggccttgcccagccagttttccgaaatatcctttagggtggaagcctcccggcctccgaggaacacgatactgtccatgtttcccatgatggtttcggaatggtctttgtacaatgccttgcactggctcattgcctgataaaaaagcgtcaggctgatctcacgggagcggatgacagccacgattttttccagccccggcacctgtccggtgttggcagcctcgtcccatagcacccgcacatggtagggcagacgcccgccataggtgttatcagcccgttcacacagaaggttgaacatctgcgaaaaagcgagggcaaccaaaaagttgtaggtggtgtccgtgtcgctgataagaaagaacagcgctgatttttcatcccccagcttatccagctccagttcgtcataagacatgatctcccgaagctggggaatatcaaagggagccagtcttgcaccgcaggaaatcaagatgcttttggctgtcttgccgctggcgagcttgtatttcttatactgcctcacggcgaagtgctgggggctgcgacgttccaacccgtcaaacatatagtccaccgcatttttgaaggtttcgtcatcctcccggacttccatgctgtttatcatttccaccagcgtattcatgttgcgttcttcctccggcccctcaaagacgatgtaggccacaagggcgcagtacaagagggtttcagctttagtccagaactcgtcgccctccttgccgtcgcctttggtgttggcgatcagagcagtaacgaatttcaaaacatcgctttccgtcttgatgtcgggtaagagactggcattactgccagcccctcccctaagaaccgtacgtgacagtttcccgtcatacggctcaagcctatcgtaaggcctcgtataaaacgaaacccggctcaaatcaagtaacctggttcatgcagatttcggtgacaccagggatgtaccataatagcgggccatttcctgttgttttcggtgctaaaatgcgtcttgaatcctgtttcggatgtaattctttctccgcatacagggcagcaccgtttctggttgttccagattttaacgagtttctcccgtcctttggtactgttcagcattctttctccgtcacgttcctcataatatcccgtccatttttcatcgaatgggttagcttcggcggcgattttcctgaatcggatgattttagtatttgccgcgtattccagcttgaggtatttttcatcgaaatctttaccgcggaaagcaggctctgttgcaaacgtccacgttcggttatcaatatggtgccagtatttgttggcaatccatttcctaccttttcgcttgtgtctgcggcaagcccacctccataggcactcgaaaatcctgtggtcaaccaatccaaaaatatccgcagaaactacatagcgatggtagttgacccaaccacgaatgacaggatttaacttgcgaatgagcaagtcctgtgtggctgttttgttctccctaacgatagtccgcacttttttgaggaaggattttatcgcattctttgacggcttaatgagcaattttccgttgtatttccgaacgttctgtccaagaaaatcaaaaccgtcgctgatatgtgtgattaccgttttttcctcggagagttgcaggccgcgttccgccagaaagtccttgatgagcgggataacctcgttacgtagagtttccgggctttttccggtaacgataaagtcgtcggcatatcgcacgaagttaatctggtcgtaaacagttttacctgccaccgtccgtctcatagggaatctttcttttagaatccgctccagaccgtctaaggtcatgttcatcaagactggcgatattgtgccgccctgtggggttccttcctctgttggaaagagctttttggtctccacaaagccacatttcagccacttttcgagcatttccttgtccattgggatatttgccagcagccagttatggctgatgtggtcaaagcaacccttaatgtctccctccaaaatccattgaggggaaccggctctgcacaaatcgttgaagcattgcccgatagcatcgtgtgtgcttcttccaattctaaagccgtaggagttcgggtctgccagagtttctgccaatggttccaatgcaaacttatataatgtctgcatggcgcggtctgtcatcgttggaatactcagcgggcgtaattttccgtttttcttcgggatgtacacccgtctgagaggttggggctgatagccccggcgtttgagtttgtcaatcgcttcgaatttgccttttggcgttttccataattcatggtctacaccagcggtatttttgcctttattacttgtcacacgcttcaccgccaatgccttggcatagaaagagtgcgtcaacagccattgcagagatttcaccttgttgtaatgaccgcctttttgagcctttacgatacgcatttgcagctttttaacataggcctccgcttttttccaatcaatggattcccagctttgtgccttgtcagcaggcgcacacagttttctgttcatttgcgattcctcctctcaaaagttctgtaaattctctcgtaaagatagacctgctggaagtcagcccgctttcgcgtgggatactgtttcaatccctatccgtcctcattacaaggtcggcattcgctttttccagcgttccttacccgcgtttctatcggctttccttgcggtcagctttccgaatatcggagaaagcgcgggcttaccacgtttcacgtaatcaaccgtgtaggttaggtgccgcctatccgccggcagtcctgtttgtccatgtgttcccagcttacaggggaacatccgactgcacaccttttggttcaggcttatcagcaactttagcctggttcccactaacgacgtttaacagcgatttacttacattcaccatactacacaagccaagctccccagccggacgttgcttccagcttttcgcctctctgctcgcggtttcggcttgaccctttcgggagggctgccttttctcgccatgctgcctcacggccgttgccagccgcttcggtgacgataggctactgctaatggaataacaggttcggtcaatgccgaacagtttaattacgcgacctcgtgtcgcgcataggccagcggattgtagtgcatggattttgaaaagtcgatactgttgaacacccgcaccctgtatttctcccgttgcaggaaccgcccgcactgatcgagggtgccgcccttcgggtctaccaccacatacgaggaatgagcttgaagaagctgcggggtcagccagaaccttgtcttgcccgagccggacgagccgatgacacaggcgtttaggttccgggcattggcgggtatcttcggacgggtgttcatggtaaggaactccgtcccggtcagaatgacattgttctgaaatttagggtcaacaaatggctttatatcttcctttgttccaaagcgggcggtgccgtactccgcatcccgccggaattttttcgcctgcctgatctttgactgtatcagcagatacatcccagccgcaccggcaaggcccaccagcaggtcaatacctccctgccccggccagtaggtttcaaaggctttggggaaggtatcaagcatccccatgagctttgtcccgaagtctgtgccgggggcgatccggtaggccgtcccgattttggagaaaaaccagaacacaaagaggtacggcaggtttgggagcacatattttctgatcttgtcactcaacgtccgtccttcaccgcctctctggttcgctgcttttcctttgcctgtgtcctgatctgctccgtgaatttccgaagctggccgaggatggaagccttgtcctgctctttgttcagcacctttgcgctgtacttctggaaggccgccgtgatagcgtccgcctgattagccttgaaaaacagcaggtaatgaccggggctcactttatggaaagcgtagtccacatggaactccttcgcaatccggtcaaaatcctttggagctcctacatagggcatggcacttttgccgccatagtggttcatcagcttttttacgctctggcgtccctgcggggtcagcgccttccggtggtgcttttgcagcgcccgaaccaccttgccaagagcggcagccagcacttttcctgtgagcttcgttgtcttgatcgaaagggcaaccgttttttggtttacttcttcctgcataaaacctcctttccgtcggggttcccgctatccgggaggcccccgtacaatctcggggaacagaaaacctcgggccaatgtggcccgaggcttaccgctcggcatctctgccggacggagctttcttttccggctccgtctggactttttcgtcctgttcccgcatggtctgcaagatagagggcttcttttgaagctgggagggcttttcgccggacagcggcttgatacattccagacggtcagccgcccggatggcgttgtccgtgagctgcctctgccatgcgcctacactgggagcccagcggaaaccgctgcttttcaactcggcccgggtgtccgcgtcaggctttccatcaaagaatacctgcaagcggttgtcctcccggttcatctccacacggcccccgtcgaactcccagccggaaaactcccgctgcgcctgtttggagagctgttcgatacgcgtctttacccggcggatctccgcattgttgttggtaagctggtagctttcaaagggcctcgggtcgctccgccagtttgccgccatgcttgctttcagcttttcgatctggtccggcgacagcagcgcacagccatccagcttgccatgcttgcggtaataggcgttgacctccttcataatgagctgggagcgttccagcccgtccagcttcttctggagcttttcaatcgctgccgggtcatcggcgctgatcccgcccatgccggtactgcgtatcttatccagcagcccttgaatataccgccattcctccatgttgctgtcccgcgcccggttctgtttttccttctttcccaccgggaaattggaaggcccggcgatcagcacagagggaaccctcgcgtcaatggcaaagccttggttcatgttttcggccagcttgcgggcgtaggtgtctaacagatggtcgatcttctcatggtacatggggtccgcccgggatttctgctgttccgctatggcggcggccttgtccaccattgcccggtattccgccgttgcgctcccttccttgtaatcggaaaagctgttcatttcctttgcccgacgggcggccccttcattgatagggtaatagttgatggtatgcacctccttcatgcttcgggccatgctggcccgaagtcctaccgttcttcatgggaaggccccgccttgtccttttttggagcgggtggggcttcttgaaaccgtttgagtgtagcgagaatggagtggacaggctcggccttttcaggataggcaaatatccggtgttccggcggaatgtcctgcggcccgtggtaatactccttgaagccctccgggactgccgacacatacccaccgggagcgaatacgccgccctcgttgatacgcacatcccgcccgtatgcctcataatcgaagtagttctgaatgtgctccggtatgtcgatggtcccaagctcgtcggcgtaaagacggcccagcccttcatcatcagaaatatccgggtaaaagcggtacaggtcaaggttctgggtcaggtttatcaaatccttcacgctccgtgtgtggtttcccaagacaagagcggcttcaaaggtttccagtccgcccttatcccgtacttccagcagggcgtggcccagctcgttcagctcgtcgatgttctcacattcgtagagatgatcgtagagccccagcacatcgctgtcaaagctggtaaagaacacttcgctgtaccgtttcccatctatcccgattttggcaagggcggcctgcaactcctgtgtcgtcgtggggaaatgtaccgttgtccctacctcgatccccattaaggggtacagggctgtattggttatataggcttcaaacatgggcttattcctcctttccggcccggtcagccagcacctcataaatcccggccataatgtaatcggcgcaagggagggcaatcgcatttcccagcgccttgtaacgttgcagaggccggatctccacgccgtccgccccgtactttgtccagccctccggcagccccatcagccgttcgctttccgtttccgtcagaaaacggatacagccgccctccgggtcgccctcataccagaaggcaaagggcgttacatcactggctaaaagagtgggaaaagggtcagttggtaatccgaagctgtttcggaaggccgtttcttcctgcctttttgccgctccccgcatacggaagcactgaaaggggtggatgactggtatctgccgccctgtttcaaaagaagctgttcgatctccttcggcggcggcccgcccgccctctccgcaaggcggaggaagtgggagcattggacggggcttaaatagtatgtctgcggcacgtctgcctccaaaatccgccacgacgaaaatccgctgccttcgtgccagccttcgggagcctgcccaatactgggcgtccatgagccgccagcacacatcaggcgttccccctcgcaccattccagcgtttccccatcttcccgaaggaggcattggaacttcggtgtccgagaaggcggataggacggctctaaagtccatccggtcatttgtagaaaacgctcccatgacgttttcccaaacagcgatagctggatataggttatcagtagcatccctcatttcctgtatgatacgaaacgcctgatagaacaggcttgattttgccccagcaaggccggagcggttgccgatcagagaaaggttctgacagggggaaccgaaggtaattatatggacaggtgggattttcccgccgtccaccttcgtaatatctcccaaatgcgccatatcgggaaagtgccttttggttatggagatgggcgctttttcaatctcgctggcccataccggacggataccgcaccgggaagcagccagagggaacacgccgatcccgtcaaaaaggctccccagcttaatgtccggcatagcccggggtgccgtgtcccttcacggcaagcaccccttccagcgttgtcgccgcaatgcccagccgcccggcaaccgcaatatcgttttttacatcctcgtccacaacgctgccgcagacgatcagggtatgggagcgccgcagcatatcccggcgcatatcaatcccggccttgtgttcctcgggaacgctgtcattcaaaaacaacggcagatacaagagcgggcagattggggaaaagcccgcctcataagcaaggcggcagtagtgggccgccagctccatatcaacatccggctcgccgctccatgcggcggtcaggtacgctaaaggtcgtttcattggttgagcctccatttctgttttggtttagggaaaagcaagatatcgcccaacccctccgccccttcccccgggaaggggaacggctctggagaatttatatccccgtcgcttgaccgggaaaaagcataaccgggagaaatccgtcaagggtgcctccggcaccgcctgcggcggcgctgcccttgactgattttcccggctatgctacggaataactggcgacggggaatcatttatatctccagagcttcggggcgcggggcagagccccgcaatcctcgggccacgttgacccgaggtttcggcttacttttcctgttcatttttcttctccggcttttcttgttccttctgctggcccttccagtcgtccagcagcttgataatctggtccttcatttccctcggcgtagtttccttgccgaaatacttgctcagttccgcacctgtcaaaatcactttgtctacctcctttttgtcctccatcataatgccgtcgatcacatccccgttgagcagcttcttttcgtccagctcacgcatacgctttgcctgcgcctgcgaaggagaggactgctggctgtcaatggcaacggcgatatagttctggttctttttgctgacataggaaagctccaccgccgtagtaaagcccagctttttttcatccatcaacttcatcaggtcgggaaccagctcattgagacggatataccgctgcacctgcttgaccgccatcttattgcgctcggccacgatctcgttggagcgtttgccagcgtccttcgggtcaatctggcccgaagtgcgggagccctggtgcttgatagcttcaagctgcattttcaaggctttggcccgctcactgggtaggatttcttcacgctggttcagattgtcctcgaccatctgggtgatggcttcatcgtctgtcaggtttcggacgatacagggcatatccgcatatccggcaagctcactggctttctggcggcggtggccggacacgatctcatagccgccatcctcacggggacggacgatagcgggctgggtaacgcccttgtccttgacgctggacaccatagcccgcatttcttcatcatcccggacctcaaagggatggttcttgaaggcgtggagttcattcagcttgatatagacgatctgctccttgccccggcgtggtgcatcctgcggcttttcgggtttcttcggagtgggagcggtctgcaccgttggagccgtttttttctccggctcctttttgaccgtcttttccggtttctgtgcgggggctttgggcttcggggctgcgtccttgtccttatctgccttcaggggacggccccggcgcttcggctgttccggctctttgggtttttcctccgctttcttcggagcctccggctgcttttccggtttttccgtttttgccgggacaggcttttccccgctgggagctgccgcccgttcctcgactttcttttccttcataatttcagcgaagttatagacagaaacctgtgggttctttacctccggttccgtctttttttccggctccggggaaacggaaaccttctccggctcttttgggggagcgggaggcgtttccttgcccggcccgctatccgttaccggctgttccggcgtttttgtggttttatcatctgccataagcatttacctcctgttttttggcatgaaaaaaggggctcaacttttcagtcaagcccccgtgggaagttcctcctttctccgccatgatacaaaaataccgcccgtagtctcgtttgggcggtactttgtgtaagattggcagtccattattaagttttttattatgtttcctttgtacaccgttgcaactgtcagtgttttccccatatcacgaaaaataaaagcaaaaaacatcggtaatgcacacagtgttatcatggcaaacagagttagtaaaaccatagtatatgtgctatcattccaaaaaagtttttctccaatataaaattgactaataattccatgtacaaataatggaaataccagaatgataatacaacctatttgagatacaattaactttactctaaatatagaacttcttttatgtccggcagtaatataagtatttaaagttcttccactaaaatcacttccaatgaacaatgctataaacactatactcaaaaaatagagtaacggaatattgtataatgatgccataattaagtttgaagagcgttctttactatctaacagcaatatgctacttaaaaggagattgaatattccaattccccaaaaataccaactgtgaaacaacttatataactcagtttttaggagatttgacatcttttgttcctcctattttgctcaaaaaatagtcctccaaagtatcgccagatacagaaagtcctgttacaagaatgtgcgattctgccaaagcagacgcaactgtctctaaatcattcaaataatcatacaaacgaattatgccatctggcattagtttaaagttatctgtatgaagattctcttccaaaaccagaaccgttttctgaacatctgttgttttaattgctatatgtcgtttacaccgttcatttaattcataatcagaaatctcttctataatttttccatggtcaatcagaataaattctgatgctgtttgatacaattcttctaagatatggcttgaaaccaaaatggtcataccatattctttattcaaaatttttaataaatttctgatttctacaattccagcagggtcaagaccattgataggctcgtctaaaatcaatagttctggtgtatttaaaagtgcaatcgctatccccaatcgttgacgcatacctaatgaaaaattgcggacactctttttacctgtatcttgcaatccaaccatatctaatgtccttttaataactgatttatctggtatgcctcgttgaatacgctgtacttccatattttgataggcagtcattgacgggaatagagcaggcgtttcaatcatacttccaattcgtttacgctgtttctgcaattcttctgttccagaatttccccataaagaaagtgtaccacttgttggaaacgcaagccctgtgactaatcttaaaaaagtagtcttacctgctccgttttgaccaataaatccataaatttttcctttttttatttgtaaatttatgtggtctaatgctaatgtttgtttatattctttggttaaagactttgcttctaaaataattgaactcatatcccaaacctcctttacttaaaccagtataacgggcaattttaaagaatttcttaaatcgtaatgagaaaagttaaaaaaataataaagctaaggaacgtttaatccttagctttatgtaggcggtagccaatgccccaaacagtatcaataaattctgtatcagagcatatcgcttttaatttattgcgtaaattactgatatgaacattaagtgtattatcttcagcaatatattctgtatcccaaacactttgaaaaagattcgattttgaaaatactttatctggatatttcatcaacaattctaaaatgccaaattctttagcggttaaggataattctattccattcaaaaatgctgtatttttctctaggtctaaagtcagattgttatattgcaaacattctgtctggctattttgaaattgtactcttcgcagattactttcaattctggcaagcacttcttccatatcaaaaggttttgtgatataatcgtctgctcctagacgaagcaagtcgattttattttgtgtagtttctttcgctgaaataataataacaggtatcgtaaatttcttgcgtacatcagataaaataatatcaccactccgataaggaagcataatatcaagtataatcaaatcaattttttctttattcaaaaaatccagaacatgaagtccatcatattggcaatgcacagcatatcctttttcttttagaaaatcagccaataacgcatttatttctaaatcatcttcaataatcaatattttattcattagcctacctcattcctgcaatgctactttcccattatacatttaaggttgtatttcctcaataccattgcaaccaattatatgagagggattcttattttgtcaatctaattgtaagcagaatagtatagattggataaacaattaccatactactctgctgtaacatttattctacaatcttccagttatcgtccttatgaagcacaagctcatactgtgagatttgcgtcattttcgacttgttatccagatactttacggacacgctgactttgaggttgtcgccgtctttggtaaagacagggtttaccagttccgaaaatacatagtcgccggatacaggagcaatcacaccgtctttgacatagtaggcaagttccttttccgtagctgtcggatagagcttaaagaatgtttccaagaaagcggtagcgtccttaactgtgtcgtagctgacactgacatcggcttcctgtgatttcggttcatactttgatttctgcactgccggagcaagtgtaggattctgggtaatgaccattgcaccgtccttatccacatgaacggtcacggtatagttttctgtgactgcctgtgtctgttctccctcttttacctgctgatctacttcgtaggcaacggtaaaatcgtccgttccagactgctttacattccagaccagcacatttgtaacggtcgcactggttggtatgtccgttctgatggtatcggcgttcaagtcctgcaattctttggtaaggtatttactgatttccgctgtcctcgcttcaatggcttccttgctagtatcccataccggttagtgtagaaggatacggattagtttataataaagaaatttttaaagatgcgggaatcgatgcctctacattgacaagctatgatgcgatagataaggcgtttgctgatcttcagaatcagattgattctggaaagttaaaggacaagtatccacagcttgaagctgttgaagaatatgctgcaaaggaaacttggattccaggacttcatacgttgaatgcgcctttggcatgtgagtattcaagtgcaacagaattaagaaattcagatcaacttggtttgaaatatgcagattcattaaaggctcttcttgatttggaaacaaagtatactacatcaaaagatgatctttccaaactaaatgcagtggattattcaagtgaaatcggaggaggtcttgctatcgaacgagttgcggttgtacagcagggaaattggattggaccagaattgagtggaattgatgaagaggtggcaaataaaatgggaattcttccgattccgttgaaaggggtaaaagaagattgcattcctacaggaatctccatttattggtgtataaacagccagtcaggtgataaagaaaaagaagcatctaaagaattcttaaaatggctgtttcagtctgacgaaggtaaacagatcgttgtaaatgactttggttttgttccggcattcaacaattatgatgatgttgaaatcacagatacgttatcaaaagaagtaaaaagatatattgatgaagggaagacacttccatgggtaatgggaggatttccttcaggatatgaaccaaaagctgcagcagatttccaaggatatttcagtggagaatatacatttgatcagatggtagatcagttgaaagcagattttgttgaattaaaaaaataaatttaagaagtgatagaaagataggcattcatcggagctggatgaatgcctaaaggtgttaaaatggaaaaatacagaccgaaaatacatttttcagcagaagattatattataaatgatccgaatggattggtatattataagggtgaatatcatctttttcatcagtataatattaacgagcagatttattggggacatgcagtaagtaaagatttagtgcattggaagagactacctaaagctattgcgccagataaaattggacaaatctggtctggtagtgcagttgtggatgaagaaaatcagcgaatggtagcattttttacttatagtgaacatgaaaccaaaaggcaaagtcagggagtagcgtttagttatgataaagggcgtacatgggaaaaatattctggaaatccgattttaacagattcaagagaagattttcgagatccaaaagtatttcgctatgaagaaaagtgggttatgattctttcaggtggagattgtgtacttttgtatgaatcaaaggaatttaattcattggaatcaaatatcttctttcaaaggaaatcaagaaagtcatacgggggtatgggaatgtccagatcttttcccaatgatagttgagacaacagaagaaaagaaatgggttttaacagtaagtgttaatgatggatctccagcaggtggaacaggaatgcagtattttgtgggagaattcgatggtcaaaaatttatagcagattcaaaccaagagaaaggtctttggatagattatggaaaagatttttatgctggagttacgtggaatcatgtacctaaagacagaagattgatgattgcatgggctgataattggcaatacagagattatcttccaacaagtccgttcaagggtcagatgtcttgtgtccgtgaattgaaattagtgcaaaaagagaaaaaatatattttaaagcaattacctgttaaagaaatggagtgtttaagaacaaataagcatgaaatgaaaaacataaagatgggagcggatgaagagtggacgctgtgcgataagaaagaagtgctagaactagatatatcttatccgattgaaaagattcatgcgcaaacgtttggaattaaaatttcaacaggaaaaaatcgacaatttgaaattgtattctgtaaagaaaaacaatgttgttttgttgatagaacaacagcaggagtaaatcctcatgataaatttgcaggaaaatataaagcacctgtagattttacacaggagtttttaacgataaaacttctaatggatgtttctcagagcgaattatttattaataacggagaggttgttatgtcgaacttactttttccggaagatttttataaagttaaattatttgcaacaggaggagatttggtaattgaaaaaagtataatttatgagatggatgaaataatgaagcacccgttggacgaggcctgatttgaaggaaattgtttataaaaacattcatctgaagttgtttgtatcctaatctacaaaccctcttgcatatacaaaagatgaaagggtaaaatacagggtgagtcttaatattacactttttcaaaatgacaaagatccagttcaactttccgcaattacagcgggaggaagccaagctgtatttttcaaaattaatacatggggggaagaagcatttctcgataagttaatcgagttgttggattttgctaattgataacttcacgtttgtagggccgataagctgtttacttgagtagaaaaaagaattacaatcaataacgccggtacgggattttgatatccagtaccggcgttattggttcgcaggtgttggtggtgaagctaccaaatatcttatttttcttctttggaaaaagtttcatggacagtaaacggtaaataggttctttccattgttagttgaattcaaaggggtgcctatagaagaaatagccaagactatgcatcatacctgtaaaacgatacaaagatatttatctccagattattctgttgaagatggacattataatgctcgtattccaggaaagcttgcaccatatgaagctgaagtaattaagttaagaagcgaaggaatgacttatcccaatattcataaaattattaccgaaaaaggttataaaggttcagttgcatccttaaggatgttcattcaaaaagaacgtattcgaaatgaagcacatttaagtcaacaagagacctgctcggattatcaatcgaaagaatacattcagagaagatctttgatacaattaatctataagggattaagtgatgtcaagacaattaccaaaacacaatatgagcaagttcttaaaacgtacccagtgattactgaattatatgctgcaataaaagaattctatgaaatactatattcaaggcgcgacgaaagattagaaacatggcttgaaaaaatagaaaattttaacatacctgagctacagacctatgttaacggcataagaattgatattaatgcggtaaaaaacgggataaaattaaagtataataatggacttgccgaaggaagtgtcaacaaaattaaagtaattaagagaattatgtacggacgaaatagttttgatttattaaaagcaaaagtgcttttacacgagcactttcgctgtgaattcaactaacaatggaaagaaccggtaaatagtaggtaccacgatttttgctagttttcatgagataattactttaaaaaatctaaggttttttagagggaggataatctcatgaataaaataactcataaagtccggtgtgaacaatggacaagtatcatcaaagaatgtcttgctagtggaatgcctaaaacgacctggtgtcgagaacatggcatttcggacaaatcctttttttactggcaacgaattctccgagaagaagcataccttactacattagagagcaccttaacgcctgctgtcaagagaatccaactccaacaactacagattttattgaaatcaaaatgactgatcaagcaagttcatctaccagtccttttaaaccggatgttgttatccgaagaggcgctgtttcaattgaaatatcaaatacagctacggaagaacttctaaacaaggttggaggtcttctccatgcttaatgatgctgttggatttgaaaaaatttttattgctacagggtatacagacttacggcgtgggattgatggtttggcatctactattaaatttcagtttgacttggatccttttcaaaagcatatcttattcttgttctgcggaaaacgcaccgatcgaatcaaagggctcgtttgggaaggcgatggattcttgcttctttataaaagattgaacatcggtggctttagctggccgcgtacaaaagaagaagctatggaaattacaccagagcagtttcaaatgttaatgcaaggattgtccattgttgcaaaatatccgatcaaagaactgaaggatccacctaaaaccatgtagtattgtgcaattcgtagaaaaaatattttatttaaaaaaatagttattcacaaccagaatcttatggaaacgattcttgttattaaagatacatttgatgcaagctgtcaaagggagaaagtctcgacagtgatatgaacgtgcaggagccagtgaatgtcatttatcagactattatttcagttaagtcattgtgtttttcttccattgtgatttctactgatgcattggcatacatcattttaggacatgaagagaaaaatacaatgacttttctatctgactaaaaatggttaattctaagcggctttaggtggtcaattttccccgcccctaacaaaagattattttgtgtatattctatcttgttttgtttatggtgcatacatatactaaatggtaaaattaaagttaatttagatatcatttgtgacaaagcgcacttcaagtttatcagggcgtgaataactttctgtatattcaactaaattaccattttcatcgtatcctatgaattcaatatagttgacgatagaggtggcacttggaagatgaaggtgcttttgaagtttttcgccagcttctaccatcatcattgtctcattaaattttacaggcaaatgatttttggatttcatataatcataaagcgatatgtgctcaaaattgtaattatcgatatctgaaaaaaaatgaataggaacataggtaaactcaattgcaagaggttccttgtttccaagacgaattcgatgaataccatatatttcatcttcttcagaaagtccaagtttatctgcaaagtattttttgtttttgattatacctgtgcctaagcatttattggaaatttcaataccaaagttacgaactaaagaggtaaagctggcattttttgattcatttagtactcctaaagcaactcgattttgttcgggtttgcggacaaaagttccctttccttgaacgcgaattaagtaatgttggctaattaattcgtcaaagatgtcatgaatcaaataccgacttacactatacattgttgcaaaatcccgttcgctaggaagcaactccccaggaagatattcctgtgttttaatttttgtaatgatactagattttatttgtgcggctaatacatcatcattgctcataaaactacctccctgataaaaccaaaacgatcaattagcatattattttcaaaaaagactgcaagatgtccttgtttatcatacatgagccctttgtatttcattaaagggctattaacaggaatatttaaaatttgagcagtctttgtgtctgcgtaaagtaaggtgactttttgattcgattttgccaaggttatttgacaattgtttgtaatcaaatcaattgcaggagcagaagcagcaatttgttgggtgagatctggatagatatattcaggaatataagttgtattgatacaaattagttgagtatcatctgaataaagccaaacaattttgtatattttcgatttttcaggaagtaacatttcgcttgcaagatagttatctgcttctatttttttgaaatcatataattcgtaagttaattgtccgctatcttcctctgaatgtaaggaaaaattacgaatggattgtaaaatgcgtttaggtgctacgtaataaccacttcgtggttttgagataattgttttatcttgaagtaacagatccaaggctccacgaacagttaagcgttgtacatgaaacagctctgccagctttcgttccgaaggcagtttgtcacctggaagatagtgttcttcctttagcatgtatttgatttcttttgataatgcaacatctaaagttaataaattttttttcataagaactcctaatattataatttacttgtaaattataatcaaattatatgttgtcagttcttaaaaagcaaatggaaaggaaaaaagaaatgaataaataaaaaataaatataaaaactggtatagtaaacttgaaatgcgtttcataccagaataaaagaaatatatgcattgtgtataaaaaaaagcatttatatttataaaaatacaacaatattcaatattctttgcgtgaaatattgaaaaaaatgaaaaaaatggtatattaaatttaaaaatagtcaccaatataaaagaagggaaagggaaaacactatgttgaaatttaatgaacagaaacagattgaaagtgtgaatggagcgcttgctctgagaaatcaaattaatgaattgattgatgggatttgtaaagaaggatagggtataaaggggcatggtagaaggagaatataacaaatgagaaaaaaaatagtggcaattttattggcagctacgatggcaattggtattacagcatgcggaaatcaaagtgaaagcaataaagacgataatacaattacagtatggtgttgggacaaaacatttaatatttttgcaatggaagaagctgcaaaaatttatcaagaagatcatcaagatgtgaaaattgatattgtcgaagttggagatgtagatgtacagtctagacttactacggctggtatatcaggagatctaagcacattgccagatatttttttgatgcttgaccagtcattccaaaaaaatgtaatatcttatccagatgtatttacagaaatttctgaaaagaaaattgatttttcagaatttccttctggtaaaacagatttttctgttgtagatggaaaacactatggagtgccttttgacaacggagtagcaattgcttgttatcgtacagatattttgcaagaagctggaatgactttagaagattttacagatattacttgggatgagtggattgaaaaaggcaaagtagtactggaaaaaacaggaaaaccattattgacaacgacagcaggcgaatgtgatttgcttacgatgatgttacagtctgcaggagcatctttgtttaatgaagatggaacaacgaatattgcaaaaaatgacactttaaagaaggtaattgatacatattgtaaaatgaaagattcaggtgtgttacaggaagtaaataactgggatgaatacactggctcaatggtgaacaatgaagttgcaggtgtgattaatgggtgttggattatgggaacaattcagacagctgaggatcagtcaggaaaatgggctattacaaatattccaaaacttacaaatgtaaagggtgccacaaactattcaaataatggaggttcttcctgggcaatctcagggaattgtggaaacgtagagttagcagaagattttcttgcgtctacatttgctggaagtacagagttatatgataatattctctcttgtggagcaatttctacatggacaccagcaggagattctgatgcatatgcagtaccgaatgaatttttctctggtgatgcagtgtttgaaaaaatagttgactattcaacaaaagttccttctattattacggggccatatttcaatgaagcaagagacgcaatctctattgcgacaacaaatattacaaatggtgcagatttagagaaagagcttaaaaaaacggaagatactgttaattttaatatgggacagtaagagagattcctatcatacaaggggatggaatgtagaaccatcacccttatggatagagaggaggagtttttgtgtctaacaaactaagaaaaatgacgttggaaaaaaagcataatttaacaggatgggcttttttggcaccagcaacatttttgattgcggtgtttagtttttggccaatgatcaaagcgttagttttatcttttcagacggggaaaggtagaaatatgcagatggctggatttacaaattacatcagaatgtttcaagatgatgtatttattcagtcaataaaaaacacatttttttatttcattcttcaagtgcccattatgcttgtagtagcgttggtgttagcttgtattctaaataaaaaagacttacggtttaaaggatttttccgaacaatgatttttgtgccgtgtacaacttcattggttgcgtattcaattatttttcggtctttgtttgcaaataatggattagtaaattatgttctagtgaatattggaattttggataaaccatataattttttgacacaaccatttgcggcaaaaatggttatcttattgggtcttttgtggagatggacaggatataatatggtatttttcctttctggattgcaaaacattgaatattcagtatacgaagctgcaaaaattgatggagcatcagcaatacagacattttttaagattactgttccattattaaaaccaactatcttgttaacagcaataatgtcaacaaatggaacattacagttatttgatgaatcagttaacttgaccgatggaggtcctgcgaatgcttcaatctctatgtcacattacatatataatttatgttttaagtatgtgccgaattttggatatgcagcagcgatgtccttcttcatattactgttggttgcagtattagcatttatacaaatgagggtgggtgataaacgtgattaaaaaaatgaaaaatataggaatgtatgcattcttgattttggttacttttatttcagtatttcctttgtactggatggtaagtgcatccacaaacaaaagtgtggatgtagcaaaaggtgtattatcgtttggctctcatttgggagaaaacttgaaaaatctgctggcaaatcaagatgtaggggctgcattggtcaattcatttaaatatgcaatattacttacaatagtttcgatggtgatatgttccttggcaggatatggatttgaaatttatcatgataaagcaaaagatgccgtgatggatgtgattcttcttgcaatgatggttccatttattacgacattggtcccattgtttcagatggttgcaaaaatgaaaatgttaaatagtgcgttgggattcattttaccaacggtatcaactccatttttaatcatgatgtttcggcagagtgcaagatcatttcctcttgatattattgaagctgccagattagatggactttcggaaattagaatcttctttcagatgtttattcctacaatgaaatcaacatatgcagcggctatgactattacatttatgaatgcttggaatagttatatgtggccgaaagtaatcatgacagaatccaagagcatgacaatgccaatggttgtagcaaatctgacagagggatatgtaacagactatggaatgcttatgttggcagtcttaatatgtacattgcctaccgccttagtattctttattttacagaagagttttgcagaaggtattactggagctgtaaaataataaatgatatctataaagaaagggattagaaatggaatataaaaaaataaatatgccaggtcttctgcatggtggagattataatcctgaacaatggttagatagaccggatattcttgaagaggatatccggttaatgaaattagcgcatgtaaataatgtttcactaggaatattttcgtgggcatttttagagccagaagaaggaaaatatcagtttgactatttagaagaaataattaaccgtttatatgacaatggcatctatacaaatctagctacaccaacaggtgcaatgccaaattggatgactcaaaaatatcctgaagtaatgcagacagatgaaaacgggatacagaatttaccaggaaaaaggcataatttttgttacacgtctgctgttatgagagaaaaaactagaaagttggatttgaaattatcagaacgctttggaaaacatccaggagtaattctttggcatatatcaaacgaatacggaggaaattttagggatgcttcttgtcattgcgaagaatgtcaaaaagcatttcggaaatggttgaaaaaaaaatacaaaacattggatgcattgaatcatgcatggtggagtgcgttttggagtcatacttataccgattgggaacagattcattcaccttctccgaggggagaggatgaattacacggtttgaaattggactggaaaagatttgtgagcgaacagttacaggacttttgtagagaagagattcgagctgttaaaacatattcggatcttccagttacaacaaacatgatgatgtatttttcaccattggattatgataaatgggcagaggagttggatgtgatttcttgggactcttatccgagttggcatacaaaagaagatgaagtaccgattgctgtgtgggcagcctttatgcataaccagatgagaggatttcagaagaagccatttttgatgatggaatcaacaccatcacttgtgaattgggatgaggaaaataatgtaaaaagaccggggatgaattacttatcttcaatgcaggcaattgcgttaggttcgaatagtgttctttattttcaatggagaaaaagcagaggatcgagtgaaaagtttcatggagcggttgttgatcatgatgcgtcagaaaagaatagagtttttcaagaagttgcttggattggcaaagatctagaaaagctaagcagtcaaatactaagtacatgtaatagggcgaaggtagctattattatggattgggaaaattggtgggctctttctgacgcacaagcaatatcgagaaaatttgattatacggaagaacttttaaaatattatcgggttttttgggaaaaaggaattgaagttgatataatttccatggatcgagagttgttagattatcagcttgtggttgctccgaccttatacttgcataaaaaagagtatattcataaagtagaagcatacgtggaagcaggtggaatatatgtaacaacttattggagtggagtagtaaatgaaacagatttatgttttattggagagagaccacatgagagattgctaggattatcagttgatgagattgatgtggggaatgaatattttccaaatactttctcctataaagacggtgtatataaagccggtgtgttaagagaagttgtgacacttcaaactgcaaagccgttgggaacatacttgcaagattacaatgtaaatactccagcaattacagaaaatgcgtatggcaaaggaaaagcttactatgttgctgttcaaccagatctggaatttttgaaagaatttttgggcgatgtaattgaggaagcaaatgtggaagcaaatttgacggaaacattaccttatggagttactgtttcaaaaagaagtggaaaagaacagaaagatgatgtatattttcttcagaattttaacagacatcctgtgaagatggttttgaatgaatgttatacaaatttgattactgatgaaatccttacaggttcaataatactgcaaacatatcaatgtattgtgatgcaaaagaaataagattccgtaatagggaggaactcacattgaaatcaaaggcaaagacatttttaattgatattttacttgatattgtaggtggttgtttcattgcgattggagtctataattttgcagtggcatctggatttccggtagcaggtatatcaggtattgcaatcgtgttttattatttttggaaaatggaaattttgatacctacaattctttaacacctaactggtattataaagtgttacgataaaatccgcaatgccttgattttactacagttttggcaagtgagctttcccttagactttcccttatgttatatccttttcccttgtgttacgacacctcataagggcaaaaacaagggaagcaaaatccggtaacagctaataacattatataaatcacataatcggctggaactggtcaagatgcttctacaactgaaacagataagagaaaggactttgcaatatgaatatcgttcatgcagaatataataaatatcacaacatcatagacatcaattattacaatggctacatacttcggattgactgtggcaaggcagaagatggattgattactactcctaactctcaacgaatgttggatgcactggcgattgacaatccactagaatatgcccgtttgtatcttgattcagaaatgcaagattgggtgaatgcgatgaatatggaatggtatagcacttgataaaagaacataaaaatgagaagaaatctgtcaaaagtatttctataaaatacgatatttctttagcccttccataaataatgaaatagagccgataactcacaatcgaaataacgagtgattcatcggctctatattttatggttatggatatcatgagtatcgctttatatgcaattgctattttgttaattcccaatatttatgacccataaagaagattgttaattcgttttgatctacttctatctcaaaattcacgctattatctctctgttccacaaaaatcatatttgaggaagatatgctatataatgcattgccacaggtaatacccaattcgggcatatctttgtttacaacaagtcctccattttcttgaaaggtaaacacttcctctgcatttgcattcttccatgtaccaataatattttttttattctgaatgtgctttatttttccaacacatacaacgataagtatagctacacttacaattaaagcaatgcctacaacactctttgccaatttctttttattcaatttctattatctccatttttagtttctttaagattgaatgattccatattgcttaattcagtatctccatgaatttctaacattgatacgcttctcacaggaaatagaataggagagattcattcataaataattaaatcattcatacttacctgaatttgtaatgtttttccatattttctcataattatctactatagttttttctgaggtcaaaaatgcaaacatagatatacttgaatagagagtttccgccgaatcaaaaaccacacaactttcatcatgagttagatttctctttgaatatatttccgatacaggcataaatgaattttcttcctctttggtgtatttatacccatcaatacatcctagattttttaaaaatattaaataagtatcttcggtcttcagatattgccatccgttagtgtaaaattcttcacctctaacaaatgatacaggttctataatgtaaatacagtcacctactgaaagattagcagaattatccttatagatttcctctatttttaccattgtttttgttgatcgtaaactcatttcacgagaatttgttacagttatacgagctattaaagaagaatctttttccatatcatccaatgagtaattactttcattgttaaagtaagaagttttctgccctcctgtatagaaaatttccatagctgtattttctgataaagcaatatcaggatcatgaacccctgtagttgtttttatcccagtctttccatagaataaggctgtcaccatacaaatgattacaacacagatagttaatacaaatttcttcattacatcaactccttaattttaccaaattccatgcatatcttctcatccgctaatatttcaatatcttctttattatggcttgtcagtatagtaatggtatcattctttttttcttccaatatacgttcacgaaataaatcaatgctatgctgatccaatgcgttagttggctcatccaaaagcaaaatttttggatgttccatcagtgcttgacaaagagctagtttttgacgcattcctaatgaatatttatttacttttttctttgatttgggatcaagaccaaagtatatcattatttcatatatttcttcatctgatacaattccttttatattggaaagcattttcaaattttcaaatcctgaatacatactccaaaaagaaatattttcaataacagctcctaaatctggtaaaacatccatatctttatgtaatgccttgtgattatattttatgtatcctttgtctgtatttataaaacctgcaatggctctgagtagcattgttttacctgaaccatttttaccatatattccatatattttaccagattcaaatgtataactgatatcatcaagcactttttcacctttaattgactttgaaatagattttacatataaattcatggatatcattcacctcacaatatttgttttttttcgcaaagaaatttacctatccacaccaaaacagcggatgatataactgaaatgagacagcttgacttaaaattcaataaatctatattgcttgtagtccattcgtaattttcttcgacataatatataataagcttgttatgccaattaaataaaggaatatgtagcaaggaataatgccaaattttccatataacatttcccattgaaaaataaaatccacacaccattactggaataaaaaatacaataaatgcaacgatgtatcctataattgaatctttccaaaatgaaaacaaataactaatcatttgcaaatgaaaaatctctatcaatagcataaaaataactttgaaatcttctaagccattagaggtatgctctacaaaaagaaaaaacaaataatcggaaacaactacaatacagtcacgtaatatcatttttattaatatatccttataaattatgtgttttttcccataacgaggaagtagaattaccatgttatcatttgcatcattaaataagtccattgtaagataacaaatctcaaggataaacaaaatcgcaaaaaatgataaagatataaggtcaaacgaatgatctattagtattcccccaaaatatatttgtgaacgtactccttctgttattgtaaccagactattatgaaaccccaagtacacattagcataaaaatatctaattacaaatgttataagtgatactagtaagcattttccaacattaacattcaaaatttttttcttatataacttcataattttttatttttctctgtataatgccaatacttaatccaaaaataagcaatatcagaacaatttctcctattatatttccatgaacattaggcataatataaccttgtatagagaattcatttagcccaaagacagaaacaatcaaattaaaaacaatatagaatataaacaaagcaccaggtatctttgcgaaatatagaactttcattttgttataatatgaaagagcataagctaagatagctaatcccgagccaaaaattccgtaattaaaaatgtatattagattatataaagttggatgttgcaatctcaccatatcaagaaaattgtcagcgttatatgataccaaacctatagcgtaatcaggttctccccaagcactgtcatatccatgtattggatatgtcaagtggcataataataaatttatgagcattggtattgttattgtcaaaaaggttacaatcagaatgccaaataattttcctgctaaatatttctttttcccgattctttgaataagtaggattgaactattgcttttttcttctcttattaaggaaagtgatgcaataattgttgcataaacaggcaataacagatacattatatatggaatatatgccgcttcagtgccctgtaatacgaaattttcatttgctgaacgaataaattgataactttttcctatatcattttttacacataaaatatacgaagcaatatttaaaatcattagagcaataaaaacaactttatattctgcacgatcaatacaatgtttgatttctataagaaccatttttttcataatctttaccaaaagggcataaacccacgaagaggtttatgcccatcccttctgttatctaaaatctacatttccacttacaaatgcagttgataattgagattgataattttccattcccataccgacctgtgtgttagtagaattataaccgctcttggtaaagattaaattacaagatcctgttccaacaccctgcttatacttattagatattttactcttgctgttattgacagcccagaaatttgcgtaagaggtattggtaattgctgttacctcatttgtgatgtaatcatcggatgttgtttttgcatgcatagaggtaaagttattagtcttattcagtttaagtgcataagcggtgtaagatgccgcctgagaatatgctgctgaagaaagaaatacacatcctgcacaaaacaaaccaatacctacttttgcaatcttctgttttaaactttttaacatcatagtcaattcctcccaatcttatttttttaactgcgttggtacttttggttcatacaacaaaccacggcacaatgaatttgcattacttcgagcaatagcagtcactgcctgaagtacgagacgggcacttttctggggtgccttgtttacttgcttattgtccatcgttttcacccccccccctccttaattgtctgacaattacagacaactttatttgtttaccatggtatgtgcttaatataacagagtatttaattttttcaatctctctatgcacgaatggtagcccaacatgcacgaactgttctacatataggtataaaaccgaaaagatggcagataggttaagcacctacctgccatctttaatctatatatttcagaaataatgattaattattgtcagtctcatatatagatttataacgctctcgatcaactggaataatctcattatcattagcatctttatatgtaataaactcatcgtattctgtaactgatttttcctctgagacagaattaatagaatacatattcgaatcgttacacattacatttgaatttggaccagaaattagtaacgaaccatcctcttgtgcatatgccaaaaagatataaatggaattttcggaaggcagtgaatcattctcaaacagataaatagcatcttgtttttctgaaattccgccttgtttaacaataggaataggtttatctgtaataagttcaccttttatattttcgagaacctgaatagtataattagtgtaaggcgaaccgacctccttaggatttcctttttcatcttcagtcgttataacatttcgatactcggttccatcgcaactgacaacctttgctacaaatacgtaatcacagataccaacagcttcgcgaatgttatcagtatcatatacaaaagatgcgtgcatctggtggattggcaagttagatacatttgtattcagttgacttgcattatttttggatgcacatcctgtaaaaaacattcctacgataagaacaatagacaaaataccatagatacttgattttttcatagcgttctccctcccctaataattattatatgcggcatcatatgaatctttatcattttgagataatgcctgcgtactagtatgtcccgtaattgctgcatccataacatctgttgaagtactgtgatccaaccctaatgcatgtcccaattcatgtgtcgctacattctgttttttactattactataaccgctcatataataggtattgagttcaattttaccactagaatatgtcatgcctgcccatccattcgaagcattgacatcgcttacgtatacatcttctacaacaaaagcactgtcttttctgattactccagatttatatgcattccatgtggcagccccagtgttaatataactcatgtaagtgctgtttccgtcatagtctagatgtttgccagaatcaacaagatcccatgtttgtacataagcttgtgcaaatgccgtaataggaaatagcattgctatagccattaaagttataatgctatacaataaatgattttttaaaacagattttttaaaatgcatactccttcactccttttcaatcatgtaacaacggttatcttcaattattcttaaaggttatctttatgaaaattgaaacgcaacacatactagtacacattatatatcctgttaatattcctaaagtacgacatcttatcatctccactccatattatagattctcagaatacttaagatgtagtagtataccttgaatataacaaaatctttatacttttcaatacctctatgcatgaatggtagctcactatgcacaaacggtagcatattatgttgtgtacctactttattgatgataaaatatgacggagaatgattaaaggaagtggtagctatgctatatattgactcaatatgggaatatattgttaatttcttagaactggcattgtttataatatttatccataaaaaattgcgtattcgagcaaattataaacatcaagcagttttgatgtttcttttcgtatcatttcagtttgctgtgttatgcacgctgaataaaatgggaatatcatcctacagcactttgatgtcatcttgtgttttggacattggatatgcagtattgttctatcgtgatagtataattcgccgtatcttttggggcttttcgtattccatcatttgcttagttgcagaacagatttcgttctttattcccgttactctttataaaggagcgtctctggagctattattaggtggaacattacggaagccatataccatgttatatttggcaatgatagctgtttttgtcttgttatttcattctattggaaacaaagacatatctctttcaccgttccaaaaagttgcatatattttcatcgcaatttctggacttgcaatcgggcactacatattaaggctgactttggaatctgttgataaatttggtgattcatccttttcagctaggctatcattggttgacttgttttttattattttatttttagtattgatgctatacatataccagctaggttattcaaaagaagaaaacatacgattactggaagaacaaaagatttatgagctggaaaggactgagttcaatagcttatctgagacaactgaacgattacgaaaaatgaaacatgatatgcagatttatgtggatgcaatcaacgtattagcaaaagacaagaaatgggatgaacttatagcatatacagagcaataccataacactcttgcaactacgcaaagtgccatagcaacgggaaatattgctattgactgcatacttaccgcaaaacttgattatgctgaaaaacacggaattaagacagaatattctattatggctcctgaaaattttccgcttgattctgttgagctttcatccatacttggaaatatatggaataattccattgaagcaggagaaagacttataatctctgatccaaccgagcatccatacatttatttttatattaaaccttaccagaatatgatactgattcacattgaaaataattatgatggtgtgataaaaggtagcattgatggagacattttgagtgttaaacaaggaaaagaacatggacttgggataagacgagtaaaagagcttgtagaaaaggcagatggcgtattgcagattacatctgataacaaaattttttccgtacatattatgataccggataaggagaataacaaactactatgaaaatgaaaataaccatacttgaagattctgtgatcgaatcagaacggctgaaaaatggaataagaaaatacgggcagcaatatgattgggatattgaaattgacgaatacgaatcgggcgaagaatatttttcaaaaaattctgaaggcacaactatacaggcttcagcatttttccttgacatacaaatggggcaaatgaatggaattgaggttgctaaacgccttcgtgaatctggttatcaaggtattattgtatttttaacagcttttagagaatatgtattccgaggatatgaagtcagagctttaaactacttgctaaaacccgtcaaggaaaatactctttttctgtgtttggatgaaatcgcgaaggagttatctaataatacctacatataccgaaacaagcaggaaattgtaagtattccctatgcagatatattgacattttcgagcagattacattatgtggatatattgaccgtagacggcaaatgctatgaacaaatgtctaccctaaataagattattgtccatttgccaagtgaatttatccgaacccatcgttcttatattgtaaatatggcacatatctatcgtattacatcaggaacgattgaattgtcaaatcatctaactacacaaatcgcacgttcttattccaaagacgtgataagtgcttttgccaaatatacaacaagatttgatacaagcggggattttgaatgattacgaagtgggctacatctattgctaataagttagcagaactatccggggaggatgtttctgcggatcaattagaaatatacatatatggcttagaatgttttttgaatacttttataaccatagtgttattgttcgtatggggagttttatcacatacactcggctataccctaatttgggtaattaccttttcattgttacgacattataccggaggtgcccatgctccaacgcagttaacatgtatcttaggcagcttttttctcggttgtcttgataagtgggctataatctatttaaagccaactgtactaggatatttgatacttgtccttatgtgtatattatttgcacctataagtaaccataaaatatgtttaaccaccaaacaaaaatggatacataaacttatttctgtgataattgttagcattggatttctgctgttttataaaattggaaacacgaagatgaataccacattgttttattcctttttctgcgtaatcattcttatgatagtcgaaacaattaaaaatctaatgagacactttaaatagcaggatgacttttcataaatattcaaaaaagataaagaatttgatggtctttatcttttttgaatttaattagattatctagctcctctgtctgatggcgaacgatagttaaaatctctgtcctgttcccgtttctgaacttctgcctgtttttctgccagctttcgatggattgagttttctccatacttggagttccattccttgtttgctttgacataggattcatactcggacttgccttgtttatagacttgcaggaacgcatctaccgttggatatttgtaatcctgcacgatatgggataatccctgcttcataatcttaatcgtttctgcgtatttgttagactgtgcctgcaattcctttcgtttctttccttggaataatcctgtacagttcttcaaatcctcgtcaataaggtcttttttcacttcctgcgtatgaatggctctgttttgtcgtttaagtttctccataatctcttcaagtcgcatctcataatcgtgtgccagctcagacattcttggtcttggcggaataacggtcttttctgcggtagtagtagcaggtgctttgaatggttgggtcacagcaggaattgtctgattgtctgtctgtgtaacggatggagctggttgtttctcttgtttttcatttcttcgctccataaggtcggagattctggctttctgttgttcctgtttctgtatcagcaactttatgagttcttttaacagctcgattgcccgaaagataatcataaacaaaagctccggatgattgccatacttgtgaatggattccttaatcggagttgaaatctgttcctgctttacctttaagatttcctttcgctccatccccgataccaaagcgtgatccacagtacgattccagtcctgtatgaccttattattgagtgtaatcttatctgcctttggattgttcttaccgattttcttagtggcaagatagacatccccacgcttgaatgcagacagcttttctttctcatctttgacaagtccgttgatgacatcggtataaaataccttgacctcatctaagaaatgttcctgcttaaagcgagcgtccttgatggtaaacatctgtctttcgtagacctcacctttcttgatcaccttacaccttttacggatagttccattctcgtctaggatttctttcttggtacgaacatgattacctttctcatcatagaacatatttctggtggcaatcttttctatcggttcgtcaagataatttcgttctgcaaagataagatggatatgataattcgtctttcgtttgttatgatggagtgctgcaatacaatcaacaccataccgacttttgaatttatccgtcatatattttaatagtccgtctggcggataatccacaaaggattccggcagggcaatgataaattctcttgcttcgatacattttccctctgtaccgcttttcttaaattctgcctgattgcacttggcaagttctgtccaaaattttcggtctgtggtttcatataccgcatagagattttcctgttttttgtcactggagatataatagattcttccacgaacattatggagctttgacatctgcacaaatgaatttcttggcatagcgatttcctcctttcccagttttgattttggaaaagaggacagataagatagatgagatgtgagtagtaaactttccctgtgagcgagtgcataggcactcgtcttgcgaacacatccgccttgtggcggctaagcctcgcagagcgaaatacacagagtacaaaacgaagttttgtgcgatgggtgtatttcgctctcaaacgccgagggcttgcttatgaagttcacttttagctgtaactgttccctcagcacctaattttgtgcctttaatggcacactttttatgtgccgtatccggcactcccttttcttaacagaaatgctagaagattgctatgaaaatcagcgaaacaatagacgaatccgttagcacttttgccttaacaatagcattgttctattattcagactttttagcaaaaaccgtagaaacagtagaagtctgctattaaaatcgaaaaaacaatagcacgattcgttagcatttttgccctgacaatagcattgtgttacttcgcttacttttaaactgtgtctggcaaggaagtggtagtaaaagttcctattaaatttcatttttaatagtgcattgttttattacattttgattttaatagagctttttactattaactctttgaaaatgtaccccatagattggacactcaaaatcatagtagcgtacactttttgtcataggtcggacagcttttttcatagctacacttggtatgacttctcacagcactttttgtaagttgggtggacttgtcctaccagtcggcttcacttgggtggatggttgcacccacttcattttctggcttgggtggactattcataacaccttttgcatcttgggtggacttgtcctaccaacaagctataactgggtggacgattgcacccattcacatccatcttgtcctcattttccaaaagttctggttgtatctgaggacttgtccgtgatataatctatttgcgtgtaggtatatcatggcttttagtcagatacataccagagggatggtcttaggactgtcccttattcatttttcattgttcccttgaccgcttttactgcgtgtctgtctcgtaaatccttcccctcattgagaatcagaaactcgtctaatcgttccctgcggattaagatttttcttcccactctaaggataggcagcttttcccattccacaagatttctaagagtgtttcttccgatacctgtatagtcggcagcttcttcaatggagagagcaaactttaattctgtcattcgatcacctcattcctgcgtaggattacaagtcttgtatatcagaggatgttcctttttgaagaaaagattagccttttttaaaacttgcgttacgcaattctgattaaagtatatatcttttataacgctatgtcaagccttacgaaattctatcatcttttatagaattgcgtattgcaatatatcgtgttatgtggtatagtaatgacataccgaaaaaggaggttcgcaagtatgttaaaagataaagaattgcgaaagacaatcggtagcagagcaaaaagccgtagacaggagttaggattgaaccagccttatgtcgctgaaaaaatgggcgtgacagcctcaaccattcagagatacgaagcaggaacgattgataacaccaagaaaatgaccttagaaggtctggcagatgcacttcatgtatctgtggaatggctgaaaggtgagacggacgaatacgaaacagacattacggataaaagagaattacagattcgtgatgtgatgacttccattctgaataagctcccttatgatatggaacagtccgaaagtgatttttccaaagacctgctactactgatgttacgggaatacgagctgttcgtggattcgttccagttcgcttgtaagaatttcaaaggaaatacagataacaaaatgctcgcccagacaatggggtttgaatccaataaggaatacaatgagattatgttccttagagaaatcacccacaccgtcaacgcattgaacgatatgggcgatattgtaagactgtattctaagaatcctgagacagcgaaaaatcgactagccaatcttttatcagaaaaagatcccgattcggtatagataggcagacggagctatgatatacttacacgcaagaagcatttcaccagttccgattgccgatatcgaaaggagaaacgattatggcaaaaggttctgtaaggaagaaaggcaagaaatggtactaccgcttttatgtggaggatgcaagtggtaacttggttcagaaagaatttgcaggtacggagagcaaatcagagacagagaaaatgttacgcaaggctatggaggattatgacgcaaagaaatttctagccaaagcggacaacctcacactcggacagatgctagatgtatgggcagaggaagatttgaaaacgggttcacttagcaacggtacagtcggtaactatttacaggcagtaaacaggattaaacaacacccaatcggaaacagaaaactaaagacagtcacttcggagcatttgcagaagtttatggatttacttgcatttggcggtgaggaaggaaattttaagtcaaagggttacaccatcgactatatccgttctttccacgcagtcctgcaacagtccttccgatttgcagtctttccaaagcagtacatcacattcaatccaatgcagtatgtggtaatgcgtaggaaagccgaggaagatgtggatttgttttctgataatgatgaggatgcagaggttatcaacccgattacaccagagcagtatcaaacgcttatggagtatctggaagaaagaaacaagcctgctgtcctgccggtacagatagcgtactacacaggtcttagacttggagaggtatgcggactgtcttggagtgacattaactttgaggaacagtatctgacagtacgaagaagtgtccgttacaacggagcaaggcacaagaccgagattggtccgacaaagcgaaagaaagtccgtatcgtggatttctgtgatacgctcgctgacatcttaaagaaagcgaaaaaggaacagagaaagcaggtattcagttacggagaactctatcagaggaactactacagggaagttaaggaaaagaatcgtatctactatgagctttatcatttggatggcacagaggacattccgcttgattacaacgagattgaccttgtatgtatcagaccggacggagcatacgaagcccctgcaacggttgagacagctttaaggacagcaaggaaacgattgtcggagcttgatgataatttccacttccacaccctgcgacacacttataccacaaacctgctctcaaatggagcagcaccaaaggatgtacaggaattacttggacactcggatgtaagtaccactatgaatgtctatgcacacgctaaccgagaaggtaagcgaaactcagcccgactacttgataaggtggttggagaataaaatcgaataagaaaaactttcccttgtagatacctcataagggcaaaaacaagggaaaaggatacatatagagtggcaaggcataccgccaagtcgcataaaataaggaaagttgagattttagttatacaaattccaattggtacaatgacgacaattttgaatattccaattattttaatttgttacaagttgttgggaaaacaattttttttaagatcaataaagacaatgttaatttctaatatactgatggactgggttgttccattgtttccaatttatcaaggtgatatgatgttatcttgtatttgtatgagtgcattctcaggaatcggatatgcaataatttatatgagagatacctctacaggtggagcagattttgttttgatggcaatacacaaggcaaagccacatatttctataggaaaaattatcattgttatggattttattattgtaattattggtggaattctgatgcatggaaacattgataagattatttatggattaattggaacgtatattctatcatttgtcgtagataagctaatgtatggcgttgatgctggaaaacttgctttgattgtaacagaaaagggaccacaaattgcggcaaaaattgatgagctatcacaacgaggggcaactttgattaaggcagaaggaagttatacaggacgtgaaaaagaagtattaatgtgtgcatgtaacaataaagaaatgtatacgattcaagaagctgtaaagaaagtagattcatcagcgtttcttgttacaatggaatcgaatgaagtgcgtggaaaaggattcaagccaatataatataaaaattaagaagttctagcatggatcggtataagattggatccggaacattatctttgattatggaacgttatcacgcgggaggaattccgattgaagaactccagatgatgccaccaaaagaggtggaattacttttttatcctcagaaaaatattaaaaagaaggatattccagatttccagtactatttatacaggtcataagatgatatctaaaaacaagaaaacaaagaaagaaccaatatcattaggaaatgaagaataatacaaccaaccttgtgcccactgggcacgaagttggcacagtcactacggtgtcaggagaaatcctggcatctttttttctgtctttttacacttcaaaaaataatttcaaaaaagttctaaaatcatgtccgattttgtggctcccaatacagacagagtacaaggaaggcaaattgaaaatcctctgatttccaaaaatcacaaacgtaaaagaggttcagacagttcttccgattgcaccttgacaattgagggagctgatacatcttgaggaacatgcttaccggagataatccggctcgtgcaggcgaagactcctacgggaagagcgaagcaataatgatatcaccgaaaggtacaggacctctgctgaaacagagactgatgttgaaatcacagatacgttgtcaaaagaagtaaaaagatatattgatgaagggaagacacttccatgggtaatgggaggatttccttcagggtatgaaccaaaagctgcagcagatttccaaggatatttcagtggagaatatacatttgatcagatggtagatcagttgaaagcagattttgttgaattaaaaaaataaatttaagaagtgatagaaagacaggcattcatcggagctggatgaatgcctaaaggtgttaaaatggaaaaatacagaccgaaaatacatttttcagcagaagattatattataaatgatccgaatggattggtatattataagggtgaatatcatctttttcatcagtataatattaacgagcagatttattggggacatgcagtaagtaaagatttagtgcgttggaagagactacctaaagccattgcaccagataaaattggacaaatctggtctggtagtgcagttgtggatgaagaaaatcagcgaatggtagcattttttacttatagtgaacatgaaaccaaaaggcaaagtcagggagtagcgtttagttatgataaagggcgtacatgggaaaaatattctggaaatccgattttaacagattcaagagaagattttcgagatccaaaagtatttcgctatgaagaaaagtgggttatgattctttcaggtggagattgtgtacttttgtatgaatcaaaggatttaattcattggaatcaaatatcttctttcaaaggaaatcaagaaagtcatacgggggtatgagaatgtccagatcttttcccaatgatagttgagacaacagaagaaaggaaatatatacaaaagatgaaagggtaaaatacagggtgagagaaaagaattttagaaaattcaaaataacctaaaaattgacttataacatttgctaagttaaaatgaaataaaaacaggtaagtaaatagtgctctagatttcagtgtagatagttgagaggaaggtgttgggtatggcaaaaatagaaagatatataaatgaagattttgaacagttactttccaaaattgagaacggaataataaatggcagtatgtcagcaacgttagaagatgccagtgactttcaaagtggaactgcgcgttgtagcgttcgtgtttttgagcgttacagctatgccggaggaaacagagtgagtcttaacattacactttttcaaaatgacaaagacccagttcaactttccgcaattacagcgggaggaagccaagctgtatttttcaaaattaatacatggggggaagaggcatttctcgataagttaatcgagttgttggatttcgctaattgataactttacatttgtaggggcgataagctgtttatttgaggataccttcaattatgctgataaaaacggtgtaagacgaggatatggttacgaactcatgcaggctctggcgggctataccggatggaaatttgaatatgtgaaatgtgactggtctaactgttttgataagattgaaaatggtcatatcgcaaagccaatccaggttgataagttgctgtcgataatatcagaaatcataagacaacaagattagttttagttatagacataggatcatagagaagtgttgtgatatttcacttactaagactccttgtcgttggctgcatcatataaaaacgctttttacgttaaaaagtgctgtaattgaagaaaaaacacgatatcatgcgagtaacaaatcaaaatttggaggctattggaaatgactgaaagagaaaaaatgctaagtggagagagatacgatccaacagataaagaattggagcaactacgcctgaatgcgcgtaaattagcaagaaaatataatttgacagatgaagatcagccagaagagcaagcacagatattgcaagaattactgccaacaacagaggagcttccgtatttgcaggcacctgtttattttgattacggatgcaatactttctttggaaaattcagttctgctaattttaattttacatgtttagatgtatgtgaaatacatataggcgataatgtgatgattggtccaaatgttacattggcaactcctatgcatccattattacctgaagaacgcaatatccgaaagagagaagatggtagtttttataatcttgaatatgcgaaaccaataactataaaagataattgttggctggcatctaatgtagttgtttgcggtggtgtcaccataggagaagggtgtgtaattggtgcaggaagtgttgtaacaagagatattccaccttatagtctggcagctggaaatccatgccgggttattcgtaagataactgagaaagatcatatgccagatggaattgaaaagaattgaaaacttcaagtttgaaaaattgagaaatcgtaaaattgaagaaagaagaaatgcacagttcttagcttatcgggagctgtgcatttctgtaaataaatacttttaatttagccgattacggcatcctctgctgtaaaatgttccagagaattttcttttacctgaatgcagatataagtaattccggaaatatcggatgcaaaaaactgacgctttgcagcaggcgcgatttttagccagtctccagttgaaaggctgatttcttctccatcaattatggctttgccgttacctgaaagaattccatagatttcttcattttctttatgagaatgaacaaatgggacatttgctcctgcaggtagttcatttaaactgatttctgcacctgttaaagacaacttttcatgcagctcaattcggttttcttttccaatagttgtttttgtgtaatttgccataataatacctccatagttaatttgtagtttcagggttgcgtggtattagtatagtgtgagacatatgcaaaaacaagtatgcacctttttgtaactgtacattcaaaattgaatgtattacaatagacttggaggtgagaattatgcgagcaaaagaagaattaccggaatgcccagttgcaacagcagtatctctcatcggaggaaaatggaaattattataaatcaatcatagattgattctttgtttggaatttaagcaacatagaaatcgagatttgtaagaataaaaaggaaaaagaaatgacggttcaacaattaaaatatattttgaaggtagcagaagttggctctattactgaagcggcaaaaatgctttttatatcacagccaagtctgtccaactccatcaaagaaacggaaaaagaggctggtatcaccatttttcaccgcagcagaaccggaattactctgacaaaagatggtgctgaatttctcggttatgctcgtcaggtaatacagcagatggaactgctggaggatcggtatgttacaaatcttccggggaaagtgacatttggggtatcttctcagcactatacttttacggaaaacgcttttgtggagttagttaagcgttttggacaagaacgatacgctttttattataatgaaaccggaacgcatcagatattggatgatgtgaaaaatcgtatctgtgatttaggcatcctttatttatcacatgaaaacgaagtcgtcatgcggaaagtgatagaggaaaaccatctggtgtttaccgaactattttcagcaaagcctcatgtttttttgcaaaaagatcacccattggcatcgaaaaaagtagtttccgtccatgacctcgcaccttatccgcggctaaactttgtacagggagagtatgaatctgtctatttttcagaggaactattcagctcgattccggtggataaggaaattcgggtcaatgacagaggggctattgtcaatttcatgcttggactgaatgcctatactatttcaagtggcattttcccgaaatatttgaacggagaaaatatcatctccgttccgcttgcagaaaatgaaacaatgcatattggatatgtgctgaatgaaaatcaggaattaagcgaacctggaaaaagctacctggaagaattacggaaatatgctccagccaatccatagtcataggctatggataatcatataaaataggtgttatgtatgtaccgctgtttgctgatataataacagcagaaaggtggttgatgattatgcctatggcggtgctgagcaattttctgatttattgcgttataaatgcctttactccgggaccgggaaatattttggcattaaataccgtaacaaactatggatataaaaaaggaaagccgctgttctttgggatttttgcaggttactatgtagtacaaatcttatgtgcaattttcgtatatggggttaattctttgcttccaaatgcaatggaagtgatgaagtatatcggagcagtttatatcctgtggcttgcgattcatattgctttcagcaagccgtcaacagaaaacgcagagcaatcggcatcgtttctgaaaggcttcatgttgcaatttgtcaatgtgaagatctatatgttcggagttaccgcactaacgggttatgttgtagaatatatgtcctcctttccggctttgctgttttttgagctggttattgcaacgatcggaacgatcgcaacctgtacttggactggcttgggcgtactgattcagaagttttatctgcggcatttccgtgttattaacattatccttgcactaacattactggagtgtatttggggaatgttaagataattgttgcttttagtgaagcataatctggattatttaaaatgattacagtagcaatggtattttttgcatttacaactctgctcggaaactgtttttattgtgacaatcttttaatctacattcacaaaaaacagccggaaaaagcttttatgaaaggcttcagactggtatcggcacttgcaatctttctgggagtaggaatggagatgtctcttttgtgggatctttccgatgcactgatggggttatggcactcattaacgttccggttatcctgattttatcagagcttgcatttaaagcggtccaagattatgaagcacagttaaagaaaggaattaaccctgtttttaaaagcgcagacgtcgggcttagtcaaaaaacagattcctggagataggtttaacaaaagctaaaagaataataagataattacaattaataccgccgatataggatataataaatccttcaagcgagttctcttttacctggatacataagtgatttctgaatcttcttaagcaaagaaatgtgatggaaaggacctgcaggacacattgcaggcaaaccggaaaaggtgcgttggtatggcgacagaaagaccaagagttccacattatgaactcttggtctttcttttttcgggacttattctttttccacaaccccttttgcttatatttaaattaagtaaatatttatttaaatatatttttctttagataatcaacagatctttctactgagctatgaggatcatcccaatatattgaatcgtttatttctaaatcgataatacctgtatagttatgcttttcaagaatttcgatgtattcttttagtggataattaccatcccctagaatataatgtccggaaggatcgccatctgcaaaatggataaactgtatagtatcttcaccaagaaccttgtaataatcttcaagattctcatgcgctacttccatagcgaccaaatcgacacaagtctttaatgctggactattgacttcttccaacatagctttcatttgtggcaagttgaccaacaaattactctcgtatggttgaagttgttcaagtaagattgtaactccacgtttatgcgccatttcacatactttactaattgtttcaactgcacgcttccaactatcttctcgaggaatatcgagaggaccacaaccagaattcataaataacctagttgttcctaaagtaagtgcatcatcaatagccatatcaaagtaatcaattgttcgatcgcgaataggttgttcaggagcactcaagctgtagggatatgctaaagtttctggcgtatacattacaaatttaagtcctaaatcttcagctttttttctgatctcacgaagttttcgttcggcggcagatgaagtgagataatctaatctgcaataatgtggcgatgctccccataagtcgagatttttaactccacaacgatgcatggaattaagataataatcgagtgtataatgaaaatattgtacacccataacagctacttgatccattgtgatatttgacataataacacctccataatttttttgatatacaagtagttaaaataagatacactataataatagaatatcataacttgtataaatgtcaatggttatatttcattatttagtacatattaaaataaaaatttgtttagagaatataaaactaaaaacaaaggatgtacgtaacgataatgtatacttctctttatgttagagtgataacattgggttttgttgtgttgaacaaatatcttttttgtttaatattgttttggaacgacgatgcatgatgaaagtaaaaatacacagaatgaaaatagacgttccaagtgaaagtagtaggtttccatttgtaataccaataattaaatatccgattaaactacatccagcgactgttagagcgtaaatcatctgtgttgaaacatgggtaagatggtttacaccagcacccgcactagagagaatagttgtatcagatattggagaacaatgatctccaaaaacacttccagctaacgttgcagcaagagaagagagtagcaattcaggacaaattgattgagcaacagggattataataggaattaaaataccaaaagttccccatgaagttccggtggaaaaacttaagaatgcagcaagtataaatacaagtgcaggaagcaaagcacctggaagtccggtagtttctataaaagttttcacaaaaacaggtgtactaagtaaatcgcgacatacactaccgattgtccatgctagcataagtatacaaccggaagtaatcatttgttgcatgccttttgtaaagttatccatgaattctttaaatgacatgatttttctcggtatatacataaaaaatgcagtaataattccagcaaaacttccccaaacaagggcttgagctgcaacacagtttcctagagcagcggtgatagtgtgaagtgaaggatcattgctccagtagccaccattgtaaagcatgccaaggattgcagttacaatgagtacaagaattggaacaatcatatcagcgacacgtccagattttggctgtgccaatgaatctttttgttcatcaagtccgccgaggaaacctctttcagctaatacctcctgttttgccataggaccaaaatccaaggaaaagacacagaggagaaaaaccataagaaggctaagaatggcgtaaaaattgtatggaatagccgtaataaaggctttaaattcagagtcaaaagcacctgtatttttaagataactaccgacagcagctgcccaacttgatataggtgcgatgatacagacgggtgcagctgttgcatcaataatgtaagcaagttttgcacggctgacatgatgtctgtcagttataggtttcataactgttcctactgtcaagcaattgaaataatcgtctaaaaaaatcaaacaaccaagcaaactagtaagtaatagagaggaacgttttgtacgaatgatttttgatgcccattttccataagcttgagctcctccagaagcattgattagataaactaatccgcccaacaaaaaacagaaaatgataatattcatatcagctttttgtatcataacgtcaaatacagtagaaacgggaccaacaatcggattcataccagaagcgatagagtaaataatggttccagataaaacacctgctataagtgaaaatagaacctcttttgtgattaatgcaagaataatagcaatcataggcggaagaatagacaaccacccaacatatacggcatccataataaaaatctccttatctgtttgttttttaatagtaaaaaatagaattaaaagaattgccacgattaggtaaggagaaaaatttcattacctaacatggagaattccgttttaggaattcgcacagaattttccgtgaagtagttaacacgtgttctcataagatagacctccttatattataaagtagtagtgtttatagaccctctccaaggtctgtagctacgcaaataagtggaataacataatttgtattaaaaaaataaaatatgtatatgtactagatgagtgaattataccgcgaactggaattgtatgcaataaaaataaaaaaaatatgataagattgtgtaaaataactaaaaaccgtacatttataaattatagatatttttttataagataattaaaatagaatattgacaatattcatacaagtgatataatttatacatatcgaatgtatcaaaaaatacaaagttgtttaggaggcgaaggagatgttatggactgaaaagatgtttggagttaagaaaccaattattgcaatgctccacattgatccactaccaggagatccattatacaagtcggaaaatgatatggataaggtggtagaacatgcacgtgaagacttacatgcactacaagatggtggtgtagatgggattgtttttagcaatgaatttagtttgccctaccagcgaaatatggatatggtgactcctgcggcaatggcatatgtaattgggaatttgcgatctgagattaaggtaccatatggagtagacgcaattagtgatgggcgagcatgtttagaacttgcagctgcggtaaaagcgcaatttgttcgcggaacattttgtggtgtgtatgtgggtgatggtggactttataataatgattttagtagtttactaagaagaaaagccgcactccctttagaagatttgaaaatgttatattttattaacccagaatcggatcggaatttagatactcgtccattagcagagattgctaagagtacaattacgaaagcagcaccagatggattgtgtatttcagcaaatgcagctggtcaagatgtagatgatacattaattgcaagcgtaaaggaggctaatcctgaaatagttgtgttgtgtaatacaggatgtcgtgtggatactattgaaagaaaattaacaacggcagatgcggctgttgtaggaaccacatttaagtatggaggtatctttgaaaatcgagttgatgtgaaccgtgtaaaggaatttatgcaggttgtttacaagtatcgagaaacattgtaatatcaagataaaggaaaagaaaatgagacgaaaactgctagcaatggatatagacggaactgctgtacgtgacgactctagtttaggggaaaaaagcaaagaagcaattaaactagcacagcaagagggacataaaattgcatttgtaagtggcagaagagatagtgatatggggtcattaaaggatgaacaatggcttgtggattatcagattcttaacactgggggaaagatactacgatgcaaggatagaaaagtgcttcataatgatttaattcctccgcatgtgtgtaaaaggctaattacacattgtcttgagcagaatatacagcttcaaatttataatggtatgacgtggcaagttacaaagatgacagatgaaaccctagagtatgcaaagaatgttggtgtaattcctgaaataattaattcgcttgaagaaacagattggaagtatggcttggaaggatttatggcaacacaggatatgaccgatgtggccgcttatattgatgagtgtattccggaggtatactacgtaagttcggagccgaactgcattgatgttatggctaagggtgtgtcaaaatggaatggaatacagttacttgcagatatgcttgaaatttgtaaagaagatattataactgttggaaattactataatgatttggacatgttgcagcatgcagcggtaggaatagctgtagcaaatgcagtggatgatgtgaaaaaagaagcagattttgtaacagagaagaacaacaatcaagatgccgtagcagagattattacaaaaatgttaaatcatgactatgatgtagttgtagaaaaatgcaatgaatgaaagaattaaaaaagtaaaaaaggaggacaatgaaaatgagagttgcagaaataggagacaattgtattgatgtttatgaacgtattgggaaaaaatatccaacagggaatgttgttgatacaggtgtgaatcttcaaaaacttggaatccctgtttcgattatcagtacaacaggtaatgatgaaaatggaaaatggatgttagagacattaaaaaaagaaggggtagacattagtcatttaaaaattggcgatggtgccacagcagtaacttatatggatatggatggaaaagaccgtgtgcatggcgattatgtagaaggtgtattggagaatattgtttttgatgaagaagatattgaatttgcggcagagcatgatctcgttcatacagcactttggggaaaagctgagaataccttaccgaagattgcagcaaaaggaattccaattgcttttgattatgcagatagactggatcatccgttagtagaagaaaccttaccatatgttacttatggattttattcttatcatgaaggaagggatgctaagattgaagagtttttaaaagataaagtgagtcgtggaatgaaaattgctgttgtcacattcggtgaagatggtagtcttgcatgggatggtgaaagattctatgtaggtggtattgaaaaggcagaagtagtcaatacagttggagctggagatagtttcattgcaggatttctttatggaatattgaatggtaaaagtatagatgaatgtttaaaaaaaggtgcagaagtagcggcttcggtagttcaggtatttgaaccatgggtagagtagagcatgggaaaaagaaattagatattgataaaatacagaaaggaagagaaatatgtttatagatatgcatgttcatccagctttttatgaaccaatcaatcaagattcagagttggaagaactaagacataatacattagatattcataaaaatggaacggcgccattggaacatatttttaatcaaatgaaatgtgcaggcttggattatttatgcttacttccagaagattatcgtacacagcaaggtggaaaagtgctggtaagtaatgaggaaattagtcaacttgttaacatggcaccagataagtttattggatttgcgggggttgatccgtttgcagaagatgcggctgaagaattggagaaagcatttgcagaattaaaattaagtggtttgaaattacatccaggtaaagggcatttttatccaacggatgaaagaatgatgccactgtatgatatttgtgaaaaatatgaaaaaccaattattttccatagtggaatgtcatgggaaccggatacattaacaaaatattgtcgcccagaaatgtttgaggaactggcagcagcaagaccaaaattaaaaatttgtcttgcacattttggatggccatggtgtagagagacagctatgttgatgttgaagtatactaatgtatatacagatactggcgcattgtattttgataatgctaaggagttttatacacagatgttgacaagagatgttccgatgacatggattgatcggagtttgagacatcaggtaatgtttggaagcaataatccgagatttgagcaaatcagaatggcacatgcaattaaagagctgggatttcgtgaaagtactttggatttaatttgtggggaaaacgcaattgagttcttaggtggaattcctaatagaaaggcgtaaagaagatgtatgttgaatcaattacattattaacaaaagaatataatgaatatacagtaattactccgaaagttttggatattgtaaaaagaagtggagttcagaatggaaccgttacggttcttacaaagcacacaacaacaggtgtaactgtgaacgaagcattagaatgtctggaaagtgatattgagaatttcctgggacgattaataccagaagattatccgtatagccatgcaagaatgcttcgagattatggtagtacagcaggaaatccaacaggacacttgaaagcaatgcttactggaaatcattgccattttccagtgatagatggtgaaatggtaagaggtggtgctcaagaaatatatttctgtgaatttgatgggccggcacatcgtacaattaacgtgattatccaagaagaaaaataaaatatataccgctcatattctattgactgaagtcagagatttgggcggtttttttatgcaaatgaagatactgttcttcagtgtttatacgattgtgataattgacataaatatgcctcaatgatataatttgaaatagataagtggtaaaaaaaacaaacaaaaatagtggtaaaataaaacatcatatataattcgaaagctaatacaagtgaaatggaggcgacaatcatgcctgatttgaaagaaaaaaataggataatcttgaagaattcaaagatgcatgaattgtgggatttaggagcaccgacaatactggaacaggctctgcaaaccattgtagcttatgtagacactgcaatggttggtcagatcggtgcgattgcaagtgctgctgtcggtctgacaagcactgtaaattggttgttaaatggaattttgtttgctgttagcatgggaatgctttcgtttattgcccaatatactggacagggagatttggaagctgctcatcatacttcagcacaggcaatttggattatttttgtttttggcgtgattgaaacagtgattgctttagcaattagtccggtgttgccaatgtggatgggcgctagtcaggaaatatggagagatgcaagtgagtatttttttatagtaaactgtccgttgatattgagaggaagcctgattatatttggaaatgtattaagggcaaacaaggattcgaaaacacctctttatataaatattggtgtgaattttttgaatattatattaaatcagcttttaattagctctcatactacgatttcagtatttggaatgttgctcagtattccgggagctggattgggagtaagaggtgccgctatagcgactgcaattagtcaagggataggtggagttactattttttgggttgcaatgcaaaatccattggtgacactaaaaggaatgaaggtgaaaccggaaggaaaactgttaaaaaattgttttaatgtttccttgcctttaattggagagagaattgttgtgggatgtggtgatgttgtattttcagcattagtagcgggacttggaacactaagtgtagcagctcattcgattgcacttacaattgaacaggctttttatgtgccaggatatggtattcaaactgcagtcagtacacttgctggaaatgctgtgggaaaaaaagacgaattagaattagaatcggttgtacgttcaggacttattgtggctgtttctattatgacagcaatggccataggtcttttttgcggagcagaagtgattatacgtttctttacgaaggatgagcaggttattgtgcttggagtgtcattactgagaattgtagcgattagtgagcctatgtatgcagcgttaattatatatgagggtatatttcatggtattggagatacaaaaatgccatttatatttgcaatattaacaatgtgggggataaggataggcctgacatggatttatattggtatgtttgggcgtgatttaaaaatggtgtggtttttcatgattatggataatattagtcgatgtatattgctttggagcttgtaccggagaagaaaaagaagcttgctattatttgatgaatattaaaaacacataatcgtttgagtttggtatatattttggttggaaaacgaagaaaaagatgatagaattagcttacatttgaaagtggtctgtaaacaatggtaaggagaataagaatatggaatatcgtataccgccgggaactgaggctgtggaaaaattggaagattttattgtagtaaatcgattggctccgaatacaagaattccatcagagagagatttgtgtgaaatgtggggagtaagcagaacgacactgagacaggcggtagatacacttgttggtcgtggggtgttatatagagttaacggagcgggagtttatgtatctgtaggaaagaagaatcgaaacatggttggagtagattcaatggtaggagaacttcgacagcagggatctattttggcaaaaaagattatttctgtaagaaaagttgaagcaactaaacagatttctaagaaacttcatgttctgctcggacaagaggtttatgagtatattcttcttaggaaaatagatgatgttccatgttttttggaaacaacatatcttgattgtgaacgatatccagattttgaaaagtattatactgataaaactagcatggggcgaattttgaaaaatgtatatcatagaaagcagatttcgggcgaggagcatattagtgttacatatgccagtgaacaagaagcagcgttgttggagataataccggattctcctttgttttttacatctggagttgtgaaagatgaagaaggagtgataattatgtattataaacaattaattagaggagataaattcaagcttgttagcagaatagagagtgaataatgagaaaagcagggcagatttatggataataaattgaactataccgaagaaaatgaagagcgtgaagacggaaaattaaattatcgtacaccaatttatcttcaattgagagaaattattagaaatcgaatagaagagggagagtaccttccaggaacagcaattccgtctgaaaataaattagcagaaacttatggtattaataggttgactgttcgcaacgcagtagatgcattagttaatgaaggaattttgagacgtgttcagggaaaaggtgtttttgttgttggtgataaatacgaagaaaacctggatgaacatggtgggtttgttaatgtaatgtcttcaggaacaaaaagagtttcgataaaggagcaggcaaaaatatatagaccagcaggaaataagtatgcaaattattttaatattgagccagatgatttaatcttttgtgtacgacatcaaataactttggatagtgagccattggcaattgaagatatatatgtaccaaaagatgttttgccgaagttagaagtagtgaactcatcagtttttacaataaaagatatttttgcattttatggaatagaaatttccagtatgcagcaaacaatggagattatagatggaacgagtaagataaaaaaattattagatattccaaatggagtagcattaattatgttgagttgtgattactgggacaataatggtagagcgattgcgtatagccgctcttttatcagaagtgacaggacttcatttacaattcagcttcatgaataaaataatagatttaaaaagtacagcagaagagttattaaaaactcatacagctgtactttttgtttgatgaaagaattatcacatagtctttataaagtctaatctacaaagattagtctgacaaacaatgcattaagtttacagtagcaggataaagagaatcataaatattctgatattttttatatgcttcatggttttctttattaggatgataggtttttccaggtttaatgaaatctgtaagtttgttgaaagattcaaagcctgaatatttgattcccgatgcagccattagagcatcgccaaaactcgcacctacagtaatggcaggggtactgatttctttaccagtaacatctgcaacaatttgcatccataagtcatttttaacaccaccacctacggcaaaaatctggtcgataggaacatcgtgctcaagcatgatctttaattgctgatttactgagtatgcaacagattccaaagcacttcggtacatatgctgacgcgtgtgagcaagcgttaatccaaatagaattccccttgcaagaggatcatttattggagttctttcaccagcaaaataagggagtgtaataaggccatcgcttccaacaggaattttatccaaatcttgcatcatggtgatataagcatctggaccaccattttgctctagttcgagtgcatctgggaaaattgtatttctataccatttagtaagagagcctgcagcattagtgccggcagatatatcacaaagtcctggtacaataaattcttcacgccataagcgttcatcatcaaccaattcttttgtcccgagaatcatataaatggaagaaccgaattgaatcatcattttgccaggggcaacaacgccagtgctgattgcttctgcgccggagtcatctgttcctacaatgactggagtaccaactgcaagacccgtttcctttgaagcggtttcagttacataacctgcgatatcatttgcttcctttacttctgctagctgatcagggcggcaaattggtaggcaagtttcaggatttggtgttccatcattaaaataaagtggattaaaacttgcaagtcctaaaaaacgatcgactacataattaccagtaagttttgctgctataaaactagagcctgttagaaacttgtgggtttttgcatatatatctggctctttattttttatccaaagaatcttaggcattacatcactggagcataatggacgtccgtaccactgtcggatctgttcttccccatacatttctgtgagttgttctatctcatcggttgcacgtgcatcaataccatataggatagctttgcgtagaggtcgacactgatcgtcgacaggtaggcagtcggcaccaagtgcacttgttccgattgctttaatgtcagatggtgaaactttagatttttcaatcagtgcattgcttataatacataaatctccccaccaatctttgtcggcatcatgttcatagtgacctggggcaggatttgtcattgcatgttcagttgtatgttctgctataatttctccgtgagaattgattaatacacctttactagagtttgttccagtatcaatccccataaaataagactctttcataaatatttcccttcctttcttaaagagaatataaactgtttagataagagagatatttttttatttattcatggctatatacgattcgtccgttgagaaaagttacttctactttgcgagaacgaatttcttcaatagctgtttcaaatagatttccgtcgaatacgacaatatcagctttttttcctttttccagtgtgccgagctctttctcttgatatagattataagcaccgccagcactccatgcagttagcaactcaggaatagtcagcatattttgtttgttaaatggctctccaccttcagggaagtatcctccgactgcatgataaatagattctgggatatcatcaataagaagtggaagatcagttccgcaacttaataacacattgctgtcagccattttacgtctgttccaataatactgtccgcgatccataccaatcttttcttcaatcatggcaagtttgtcttttcgatttgcgatagattgaatttgagggtatatttcagcaattacgcctaattttcccatacgctccaagtctgttggatcactgaattcaagatcggtaatactgtgacgatttataagttttccattttcatctttttggcaagagtcataaatatctaatacttttgaaatagcagcatctccttgagcatgtaatgagaaacgaaatccttcggcatcagctttaaaggtatcgtttgctaaaagatcccaatcaatgtcttgtgcacaggtcgtatctgcgcaggaataaggttttttcaaatcaccgcaaagttcgcttatagaaccgtcggtcatttggttatatccagaaaaacgaacaaactctcctttaaatttttcacgcatttccttgccatatgagagattaaaaggttcagcaacaggttggctcataaagtttacgcggatagttaaagcgttttcggattctagttctgcgagaatgtcagtaaatccgtagaaatcatcgaatcccatttctttgatggaagtgattcctttactgttcatcattttaatatagcgcttaaattccggaattataaagtctttatctccaagtaagtctggtaaaaagcgaacataactctccggataacaggtttccggggtaaactgataacgatttatagcagcttgattcatccaacaagtttcgcagccttttgcaaacagaagaacagggcgagtggaaaaagcctcatctaacaaatctgttccattaggttggattgtatcggagttccaaccatgtcccaaaataggtttgtctgcaggaattcctttcgcatactctttaattgaattcagtatatcttcttgagaagtagctgcggataagtctattccaacaaatcctacagaataacctgtgaaaaagcaatgtacatcggagaatccaggcgtaattgttttgttcccataatcaagatattttgtgtttgttcctattagttcagtaggagccaatccttttccgatagaaagtatccggtcgtttttgatagcaatatatccagagaaaggtatttcctctgtggctgtaaaaatacagtttgataataaaataagatctgcgtattcagacatattatttaaacctcctaatgattaatgatatttgtaaagacataacttatatataggaaaataaagatattaagagtaaaagtgaggcgacatcaaataacagatgaaccttagaaaggtcagatatccagcaacaaaaaaatcaaagctgaatgcttgttccttaatgaataaaagtcatcgaagtgttctaatagatattgcacactatctattagaacacttataagttatcatggtgcacaaagcattggcaattggatggataactaaaaaataagtagcaaaataagtgcatctgatgaaattggtataaatgtaaatcaaaaacataccactatatgcataatgcataaaaataagagaaaataaaggggaaataaagaggataaaatatgcagaataacataattggtataggattggaataacaaacaacatgattatgggattttatacattttttataattgaattttagacctcttgcgaatagaaaatggtgcttaattattgtataattttaccaacaaaacacaacaaggaggaatgaaataatgttaaaagttggaatgtttacatcgggatatcagaggaatccgttggagcattgttttatggatgctaaagagtacggttacgattatatcgagctttggggtgggcgtccacatgcatatgcaccggatctgaaagcgggagatattaatgaagttcgccgattaattgaaaagtatgaaatgccggtgcttggttacacaccggagcataatgcctatccttacaattatatgattggttcagaggctcagagaagagatgctgttgattatctgaaactgtctcttgaaatggcaaaagagatgggtgcggaatttgtacttacaagtcctgcaaacggcggatatcttgctacatatgatcagttgtggagcagattagaaaaaaatattcaagagttgggagattatgcagcaaaactagaaatcaagctagtagttgaagctttaacaccgtatgaatctaatttctttacaagagcaaatgatttggtggagctatttagaagagtggataatccatatgtagtcggcatgtgtgatattgttccaccatttgtacagcatgaaagtattatggcatattttgataaactcggaaataagatggatcatatgcatattattgatggagaaaatggatcagacacccatctgataccaggagagggaaatattccaattaaagaaatgctatatgaaatgaaacgaataggttatgataaaactgcaacacttgaattggttacaaattatattaacgaaccacgtttttatgcgaaacgtgccattgataacatgcgtgagctaatggccgaggcaggaatcgtttaaatgtgaaagtgaataaataaaaagtaatagattatttaagaaattgtgatagcgaagatagatagctgtttacaatataaaagcatcgaagataatagaaaattaaaaaaagaaaagtcgtgcacaagatttttcaattatactctgtttaaaaggaaaggagagcttttatgtctgaaaacaaaaacgaacttgctcgtaaacttggacttggcgctgttattgcacttggcgttggtactacagtaggctctggtattttttcatctttatctgaggtagcaaatgctgccggtagtagcttgtttctggtattagcattcattatagggggattgcttcagattccatcaaactttgtatattcggaattagcatctgcctatccagaggatggtggacaatatgtttacttccgtgaagcaggatctcgaccactcgcattcttgtgtggatggatcagcttttgggcaactgacccaccgtcaatttcaatcatggctttagcaattgtgaattatcttgcattttttgttccgattcatggtttggtattaaagctggttgctgtagtatttgtattagttttcatgggagtacatatacgttcggtagaaggcggtggaaaattccagacaattattacagctcttaaaattttaccatttgcattggttattggtattggtttattcaatcttcagggggatattttattatcttctgcacctttgaaaggatatgcaacaggtggaattgctgcgctaatcgcaggtgtagctacaacaacatggtcatatgatggtatgggagctgcttgttatatgtcaggcgaaattaaaaatccgagaaagaatatgcctttgggtcttattcttacagcagttattgtactagctctttatgcaggattaacatttgtagcttctggaattctttctattgatgaaatggctacatctgatgctccaatcgcattgttggcatctaagcttccaggaattggacagtatgcaggtacaattgttgcaattatggcaattattgttgtaattggttcattatcatcttgtattatgttccagccacgtatcgagtatgctatggcgaaagataatttattctttaaatcttttgcaaaagttcatccaaaatacgaaactccttatttttcaattatcgtacagtgtgcggttgcaatcgtattaatttttgcttcaaacttgtcagcattgctaggatactttacaatggtagcattattaaagaatgtgcttacattcggtacaatctttgttcttcgaaaaaaaggcaaagaacatggatacgatccatcttataaatgcccaggtggtccaattatgcctcttattgcaattattatgacaggtacacttatttggggccagcttacatatgcgccaatgcagagcttaatttgtgcgtttgtggcagtagctacaggacttccagtattctattattgggatagaaaaaataaaaaagaaagtgcataagcattagcttaatatgttgagaaggtgagaactgtatggagaaaataaaaaaaattcgtccgcaagatatggcgatggagcagattcaatggtatatacaagaaaaccaactaaaaccacatacacagcttccgagcgaacgggagttgtgtacaatgtggcaaatgaatcgttccactctccatacagctattcaacaactaattgaagaaagaaaactatatagtgtaaaaggatctggaacctttgtggcacctccgagattagttaggaatataaagggaattcagtctacttcggaagcaatgagaaaaacagggtactttctttggacagaagtattaatctctagaattgagacgtgtgatggatatgttgcaagaaaacttcagataaaagagggagataaagtatttcatttatatcgcttgcggattagaaacaatgttcctttgatgattgagaatagttacattaattacgaacagtgtgaaggtttggaagctcacaattttgcagaagaatctttatataaagttctaagggatttaggcatattgttgactaaagggacggagaaagtagaaattacatttgccacagaagaagaagctaaattgttgaaggtagaagaaggacaatacttgtactatcagtcaggtgttgtaaacgacgatagaggagtaggtattgagttttttaggattatggcgagaccagatcaggtacaatatacgaatgttctaacaaggcgagacaccagataaaaaaggagtgatatcgtatgagattagcggcagttggaagtaactgtattgattattataacaatatagatggtggaaaagcatttccggggggaggcccggtaaatatggcagtttatacactccgtttaggaggagaggctgcatatattggaccagtaggtgatgacgtctacggacagattatgatagaaactatcaaagcgaaaggcgttgacacttcgcatttgcgtgtagaaaaaggaaagacagccgttacccaggttgaattgatagatggcgaaagagtatttggagattacgacgaaggcgtattggaaaaatataaattaacagatgaagatattgattatatcaaaaattttgatgttgtaatttgtgatgtttggggcaaagtagaaggacagtttaaagagttgaaagaaaaaggaattgttactgcctttgattgtgcgacaagcccagattcagaggaaagtgtaaaagcgataccatatacagattatctcttttattctgtggatacaggagatactaaagaggtaagagaacaaatggaaagaattcaaaaacagggacctaagcttgtcatttgtatgatgggagaagaaggcagtttgtgttatgatggtgaaagatatcatcgttttggaatcgttccttgtgatcatcttgtagatagtatgggagctggagatagttacattgctggatttttaacaggaattgtagatggactttctatagaaggggcaatggaaaaaggtgcagcaaatgcaacagaaacattaaagtattttggagcatggtaactaaaaaataaggagccgaaatatgaaaactgcctgtaaaagaatgatcactcagcaagtgagtgagattttaagaatagaaatagaagatggtgatttatatcctggtacaaaaatacctactgatacagaattggctgaaatgtttggtgttcagaagcaaatcgtgagaacagccatagaagtcttggtcaaagaaggattgttgaaatatatttctgataaagaagtatacgttttaggacataaaatcgaacgaaacatggagaagttagaaggctttacgcagacgatagtagataggaatatgaaaccatcttttagaattgtgtctaagtatctaagaatggcaggaaatttgtatggaaacatgttcggcattaaaccagaagagcctattttttatattaagcgcatgtgttatgctgacggagattcgatttctttagaggaattatatataccgcattatttaattcccaaaatggaggggattgatttatcggtgttttctgtgtatgaagtatatgaaatgtatgggattcatttagcggaagcagagcagacattggatttggttcgtcctagtttaaatgatgcaaaactgttgggaatagatgcaggaacacccgtgatgttgtttcaaagtcttacgtatgatacggatggaagggcaatcgaattcaatcgcaattatgtgcgtggtgataaatgtaactttaatgtacaattttcagataaaaggtaaaattaaaataatgggattatttacaggaaatttttattccaaaaatttaagaatgacaacacagattaatgttattttcccggatgtttctaatgatgtaacacctctttatgagggaacaccgaaggttctttatttacttcatggactgtcaggaaatagtgctgaatggacacgattttctaaaattgaatattatgcaaaaaaatataatttcataataattatgcctgaagttcaacgtagtttttacacaacaggaaaagttggaattgattatttccattatgttgcagatgaacttccagctatttgtgggaaatggtttcatttggatcaaagacgagaaaatacatttatagctggagagagtatgggtggatatggtgcagtgaagattgcattgaatagaccagagaagtatgaagctgtggcaagtttatcaggagtactcgattatgtaggatttacggagatggtacttgccggaaattgggaagatatgtcgccacaagaaatacagagttttcatggagaagcaggaaaaccagaagagtgggaaaatccactgtttttggtagagaaacttgctaaagacgaaaatcgtccaaggttaattcaattttgtggtacagaagacttcttatatgaaaataatcagaaatttagaaaagttgctgaaagtaatggttatggtcatgtttatatggaaggaccaggggatcatgagtggccttattgggataaaatgattcaacgtgctatacaatttttcttaaatttagatttgcagacaacgaaattgtattaaaaagaaagtagtgaaaggagatatcaactatgaaatatgaagcaaaagcgtggaaagaaacagaaggagcttgtttgcgtaattttaacgagcaagcacagattgatagtgtgaatggagcacttgctcttcgtccgcagattgaaaaaattattgatcaaatctgggaagaaggatttgatggaatctattttattggtattggaggtacttatgcttccagtatgcaggtggaagtatatatgcgtggccgttcaaagcttccagtatttgttgaaaatgcagctgagtttttgactacaggaaacaaaaaatttacaaataaatctgtagtaattatatcttcagtatctggaaatacaaaagaaatggttgaattagtggacagagtacatgaaaaaggtgcaaaagtattttcattcatcgataatccaggtactactctcacacagcctgacaagcaagattatctgattgtttatccaatgaatgagcagttgaaattttatatggttgcaaattacttgatgtataaaaatggtgaatttgatgattatgaccgttataataaagagatggaagctaatcttgcggatgtattagctcaggttgagaaagattccgatgagtgggcatatgagtatgcaaaaaataaggtggcattttggaaagaacataaagatcttcctcattactttattggatcaggaaatcagtatggggcaacctattcctatgctatgtgctattgggaggagcagatgtggatccgtacaaaatctattagctgtcaagaatttttccacggaatgcaggagattatcgttgaagatacaccagttactctgtttatgggagaggatgaacaacgaccattagctgagcgtgttgcaaaatttcttccacgtgtaaatgcaaactatactattattgatacaaaagaacatgaattaaaaggaattagtccagaatttagaggaacaatttctcatttggtaatgcatggtgttaataatcgtgtagatgcatatatggagctgtttttaagacatccactttctattcgtagatattatcgtcagtttgattattaagaattagatttttaaaaaatattggtagaatgagtgctgttacactaagtaattgtacagagactctttgctatgtaaatagtcaggtgaaaaggttaattgaactatttcacctgactatttttagaaatataaaatctggcggggcgaaactcaggtcattgctcagtaaccacgaaataaatgaagatgattaatccattttagaagaaaaatagagcgaaatagaaaaggctgtgatttcaggatgttaagaacacattttgaaatcacagcctctttgattacagaaaaatagctttgtaatcgcatacgccaaatagcagaaagctaagacggaatcaacacacatgcacaatatcccggagttggttgaaaacagtagatggtcagagtcttgtcgatttccggactataatcatgcaggatatgtttattgccgtttaacgctacatccgcataagtgacaagccattttttatctccattttcaaagacttcataaaatgaacgattcaacatttctgaaacgggaacgccttcaacaacagccatttcatcattacagtaacggaatacaaagtctacaccatgtccctccgcatcaaatacaagttcaataatacaaaaagcaagtggcatatcattgagaaagctacagctatcaaataattgaattgagctgtcttctgaaacctccgaaaggttctgcgtatttaaaccaagttccttacggatctgtttgtgctgactcagattacgttttcttccttgaaagacagcgccatcagtcattgtataaagcccctcgtcagatatatgaacaatttgattttttcgaagaaacgccttttgaaatgtttagaaaatcttcttctggtaagtagagcataagttcttttatcgggattgtagtcgtaatgctttctcccgaggaaagcgtaatgattgtgtgaggattctgtctggtaaggtaaaaaatatctgaacttttgatattctttcgttcgaaatatagtggaacattataacgcatataaggaccttcctttattgtgataattttatattactatagttgtattgaaaacacaacagaataattaaaatgcaataattaatatgaacaaaatgcactttaatttagtcctgccacgatttatcgacgaaatatcaaatgaaggtgcggatttgagtaaaaaatattgctgattaactgcgtgtgtgatattataaaagagtataaattatgatacaaaacgaatcattaagcagagacagagataaagaagggagtgggaagcggatgaaaagaagaatttcgaaaaggattattgcaattggagtgagcctttgcgtagcattttcgattatgcctttaccagtaagtgcagaagcagagaaagagacagggacttcatcagcgcaatctaaagaaaacccatgggtgagtaccggaagaacatttagtatcaatcgtgtttactcagcaggtgatggtttgttgtctctgagtattgcaaatatcatattgcataccttatgtgaaacagctcccattgctacgagctttggttttgagtcacatttcttgaggtagtactcacgaagaactggatttttagcttctccattacgggagatactgatgctttgtaaggttaacgtgtgaataacacgtctagctatggcagaaccacgcttagatatttgaaccttggtaccttcgaattttccggattgttttactgccggatcaagaccgaaataagcgaaaagttgttttggttttgaaaatgctgagaagtcaccaatctcacccatgatggatacagcagacaagaaaccagcacctttaaatgtttcaatcaaatgaatctgtttgacaaagtcggcatcttcattagcatcaacaagctcatggagcgattcaagaatgttgttgatttcttcatcatatttacgtatgaagctgatataaaggcggatacgcttgatgttgctgtctatgatgtaaccaaactgatttgcatcagttgctgcctgaattatggcattatacttattttgagcatatgtaagcccaaagcgagctgttgatttgatgatatcaataatctcttgcttgtctgctttaagaaaagctgatggagaggtataagtctccaataatgtaagagaagtgttgacagtaaccttggaaaagatgcccagatactgtggaaacgccatgcgtaattcaccctgaagcttattcacataggcactgcgattatccattaaatcgtagtattcacggcataggttacggcagtttagagcaagatcggaaggcataagtgaaacctttaaatcaggtttcaaaccaaccaaagcagcttttttagaatcaaaacgatcattatgtacttttcgtatgttgatatttgtgctattcttagtgatgataggattaataaccgagcagttaaaacccttatcacgaagatagcagaagagtgggtaatgataaattcccgtggattcgaggaaaatgcgactttccaaagaatacaactcttctgcttcttttattttagaaacagcggttgtaagggaatcaatactgttatgtaggattttgtaaggttttcctacgaattgttggtttggaagtgctatagacatccaggagaaatcagcaccgacatcaataccaacagagatgaatagttcatcaagattaaaaataactttgtttgacatgagcaaaagctcctttctgataggaatccatttccaatctggcaggtacacaacctagcgcgttattcgggtattgccttccggctcccaaccagctaaaacataaaaccctgtcgaatggactaattgacttaattacaggtatccactgataatcagtgtcccaaggagaaatacattctttgtcctatcctaagagatgataccttatgttttatctggtgtctatcaggaaccgtcagacatgatcattattacggataacatctgatgaaggaagaatcccttcttctgttatctgatttatagaaacttattaaccaagtagtcttgattgactacatcattattatactaggagaaatagaaaaatttgaaaataattaaaaaaaaggtagaaatacatataaataaataataaaaaaatatacataatgcataaaaaaataaaagtgctttcagaaatatagtaaaatattgaaaatattatcaaaaataaatagaatgaaaataaaataagtgacaatggacagcctgttaaaaggagaatgtacaatgaaatgtagagcggaatatgagaatgaattagcaaaaactcgtgatcaacgaatgaagtggtggagagatgcgagatatggaatgtttgtacattatgggatttattcggtgtacggaaaacatgaatgggcaatggcagaagaaaactgggatccagcagaatatgcaaaatatgttgatgggtttcaaccagtagaaggatgttgtagagaatgggcaaaattagcgaaagcagcgggaatgaaatacatggtgttaacaacacgccatcatgaaggtttttgtttatgggattccaaaattaattcatttaattctgtgaattatggaccacatagagatatagtaaaggaatttgtagatgcatgcagagagtatggattaggtattggattttattcgacattaatggaatggcgacatccagatagtagtaaatgtgcatatgctggtgaggctagacgcagatatcaagcatacattatgggattaaatgaagagctaatgagtaattatggaaaaatagatatattgtggtacgatgttccagatccaatggaatcacaagagggatggaatgctttagaaatgaaccaacgtataagagaattgcaaccagatattatcattaataatcgtagctttttaccagaggattttacaacaccagagggaaatgttatcccagcagataaagactgggaagcatgtatgacatttaatggattaagctggggatatttagattctgaaagagtaagaggatataaccatacaccacaacagattgcaagaatgttgtatttagtttcaaaggaaggaggaaatttattattaaacattggtcctaaagcgaacggaacaattccagaagatgttattgagccattgttgactgttgggaaatggatcgagaaaaacaaaggtttcctatacggaagaaaagtagcaaaaaggattaattatcatacaacaacgggaatctgttttgaaaaaacaaaagcgtatgcatggaattttatttggccgtctgataatacaatttatatatcagggattcaaacgaaattaaaatcagcttattttactgcaacaggtacaaagattgatttcaatcaagatgaatatcgaattactttaaaatgcttgccagaaaatgaagaagattctattttaggtttaactatcataacgcttgagtttgaagatgagattgtgtatccaggtgttgggtggaacagacatactacacgatatggacaattaaattgtggttatacttacagtaaaaaataggaagggagaaaaatatgaaacagcgaataaaaaaattatgtgcaatgttaattgcaggaacaatgctatttagtatggtaggatgttcaggaacggaaagtaaagaaaatacaaagggaaaaacccaaaaagaagagaatacggataaagctctctatattagtgtggaaaaagaaagtacaagttcggacaaagttgaatttccatggtataacttaagattaccatgtatcttaatgtacagaagtttagttttagccaatccagcagaaacagaatttgctcctgatatggcagaatatgagatttctccagatggtttggtttatacatttaatctaaaagataatttaaaatggtcagatggtgagcctcttactgcagaagatgtgaaatggtctgcagaaacagcgttaaaagcgacacaagttacatcaacatttacaacatgttttaattatatcaaaggtgcaaaagaatttacagaaggaacagctgatacaatttcaggtattgtaattgatggaaataaaattatttttgaattaactggaagttatgcaaacttcttaaaaagcatggcacaattttcgatattaccaaaacatagtttggaaaatgaagatccattaactctttatcagtctgatttttgggcagaaccagttacttcaggatactataaatttgatgagatgcatgcaggaagttattatagcttgtcattaaacgaaaactatgaaggaactaagcctaagattgaaaaagttgtttgtaattatgtttccaatcaaacaacagcaattacatctggagcgagtgactatgcatttacaaattcaagttcagatattgaagttttaaataaagatgaaaatcttacaggatattttaatgaatatttattctataaatacttgatctttaatatgagcggagcggatggtaatcaaaatccagcaatgcaaaatccaaaagtaagagaagcagttgcatatgcaattgatagagatgcaattgcagctttatatggtgatgtagcaaaagttatttataatggtgtgccagttagtgatgaatcaaatgatggcaaggtctataaatacgatccagaaaaagcaaaaaaacttttagacgaagctggttgggattgggactatacagttcgtattctctattataatgatgatgaaacatcaaagaatattattgcagccatagttcagtatttgcaggatattggaatgaaagcagaatcaacatatacaagtcagggaacacaggatttgtttactacacgtgattacgatattggttttaaaggaactggtcctttagatacatattattctgaatatatgtcaaatagtgcaactttccaaaatatttatggtggagatacagcttttgatgaatctatttctcgtttgatgtcttccacagatatggaaggacaaaatgctgcgaaagccgaattacagaaaattgaagaagagaaattatacaaagttcctattttgacactgggatactacacttatttaaatacatctcgtttgaatgttccagaagatcttgatatgggtacaccaggacatagatgtgacattaaatttacagagtgggaaattaagtgaaactgcctaacaaagagggatgaaaattaattattcatccctctttgtgcatattggataggagaaaaaatgataaaatatacaattaaaaaattattaatgatgattcccatgctattaattattagtgcactgattttttttggaatgaaagcaacaggtattgatccaattaattatctggcatctccagatattgttgctaatcctgcgttgttggaagaattaagagaaagcatgggtttaaatgatcctgcaattgtacaatattttcgctggttaggcgaaatgctaaaaggtaatttcggcatatcacttagtacaggaacagcaatcgcagatatcataaaaaattaccttcctgcaacattgatactttcagggatttctttagttgtttcaactattttgggcatagcatttggaattatttcagcagtacgccaaaacggtatttttgactacataggtagatttttagctgtattaggacaggctgtcccacagtttattattggagtaattttattagcgattttttcagtaaacttgggttggttgccatcaagtggtagattttctgctaatggtgcaggatcttttttggattctgttcagcatctaatattacctgtcattgcagtaacgattccaatgtgtgcagttcttgtgaggtatactagaaattctatgcttgatatcatgaattcagattttattaaactagcaagaagtaaaggaattcctgaatggaaagtatacattaaacatggatttcgtaatgcgcttcgaccagttttagtaatattggtgtttagaataagccttctttttagtggatctgttgtagtagaaaatgtttttgcttggccaggagttggggcaaagttaacagaatctgtggtttcaggagattacacagtagttatggttttagcattagttattgcagcatcagttttggttgcatcttttttactagatattataagtgctttgcttgatcctagagttcgtgcaaacttataaattaattcataagtggaaagggaaaaatcatatggagcatcaagaatatattagtaaagaacaaaaacaattgcgaagtaaggaaataagaaaaaaaagaattaataaatttttgaagaatagattatcagtattgggttttataatgacgtgtttaatcgttatagcatgttttatttgtccaatattaagtaagcaaacatatgatgcagttaatattgcagaaagtgcatcggcaccttccatggaacatatttttggaacagataaattaggacgagatttatttattcgatgtatggctggtggaagatattctatatatataggagtgtttagtgcggtatcaagtactgtgttaggtgttatcttaggtgctattgcgggatattttggaggtaaaatagactctttaattatccgattaacagaaatatttcagagtttccctcaaatggtattggttatgattatggttgctgtgatgggaagaggaataggaaatatattaattatatttactgtcacaggatggatgtctacagctcgactggttcgaaatgaatttttagcgtttaaaggagaaacttttgtaaaagttgctgaggcatttggtatgagtaaaataaaagttatgtttaaagaaataatccccaatataatgacaccaattatcgtttctgcaacggctgttatcccaggttatattttatcagaagcaagtctttcttttttaggagtaggtgttgctgattctatacctacttggggaaatataatgaattcagcaacttcattaggagtcattacaaattattggtggatgtgggttattccagctgtacttcttacaatttttgttttatctgttaattttttaggtgatggagtgcgagatctattggacccaagataatgaaaagttaggtgagataaatattatgaacgaaaaaaatatcatactaaaagttagaaatttatcaacaagttttttgagtgataacaaagaaataaatattgtaaaaaatgtttcatttgatgtaaaaagaggaaaggcattagcaatcgtaggtgaatcaggttgcggtaaatcagtaacaatgaattctattttaaaattgttaggacgaaatgctaaaacagatgctgatgagattacattttacgaaaaacagagtaatggaacaataaaaccacattatattaataaaataaaaaaacaaaatggaaaagaaatgaattatctgcgagggcaaaaaatatctatggtttttcaagatccgatgtcatcactagatcctgtatatcgagttggagatcaggtaatggaaggattacgtgaacattgtaaaatttctaagaaagaagctaaaaagaaaaccatagaaattttcaaaaaattgggaataccggatgctgaaaaaagggtgaattgttatccttatgaattttcaggagggatgaaacaacgagtagttatagcaattgcactgatatgcaatcccgatttaattatatgtgatgagccaacaacagcattggatgttactatacaagcacaaatcatggatattttaaaggaattgcaggagcaactagggatatctatagttttaataacacataatatgggcctggtagctcagatggcttcagatgtatgtgtaatgtatatgggcagaattgtagaaaaaggtacacgtgaagaaatatttttaaatccacgacatccatatactcaggcattattaaaatctgtacctgttttaggaatggccaatgataaaaagttagaaactattccaggtataacaccaaacccagcagatttaaaagaagggtgtgaattcgccgatcgttgtacttattgtaagaatgaatgcagaacaggaaaaatatctctttacaaagaaaacgaaaatcatagcgtaagatgtttactttataaagaacgggggtgggattgtgagacaaattgaatcaaaagaagtaatttttgatattgaaaatttatgcacatattttcacggcagaaaaaacaatgttgttcgtgcagttgataacgtaagtctaaaggtatacaagggagaaacgttaggtattgtaggcgaatctggttgtggtaaatcaacgttaggaaaatctataatgtcgttagaaaaaccaacaagtggaaaaatattttataattacgagggtcaacaaaaagacattacgcaattttcaaaaaaagaattatttgaatttagaaaaaaagtacaaatggtttttcaagatccctattcagcactaaatccaatgaaacgagtatatgattcatttcatgaacctctaaaaatacatggattttcaaataaggatacaagagaaaaaatgatttctaatgcattagaaatggttaatatacaaccagattatatgctacgttatccacatgaattttcaggaggacaacggcagagattatgtattgctcgagctttggaaataaatcctgaagttttaatttatgatgagccagtatcagcgttagatgtttcaatacaagcacaagtgttaaatttaatgaaagatattcaggaaaaattaaatttaacctatttatttattgcacatgatttatctgttgtagaatatatgagtgatagaatagctgttatgtatcttgggaaaatagttgaattatcagattgctctaagttatatgcatccccttgtcatccatatacaaaagcattgctttctgctatacctattccggatataaagaatcaaaaaaaacgagaagttttagaaggggaagttccatctcctatatctaaacctaaaggatgtgcttttcacacaagatgtaaatattgtaaaaatatatgtaaggaaatggagcctgaattatacgaagttgaaaatgaacactttgtagcatgtcatttatatacctaagtgaggtgagagtaattgaaggaaacaaatttaaaaaaaaacatagaatcaattcataaaaaactaattgtttcatgccaggcattagataatgagccattacattctccttttataatgggaagaatggcacttgcagctctagaaggtggtgcttgtggaattcgtgcaaatacaaaagaagatatttctgaaatacaaaagtgtgtaaatcttccaattattggaattgtaaaaagagattatgaagacagtaatatatatattacaccaacaatgaaagaaatagatgaactaatggaagtaaaaccagatatcattgcgttggatgcaacgtgtgatataaggcctaatggtctttcacttcaagcgttttataacgaaatacgcgaaaaataccctgagcagctactaatggcagattgttcaacaattgaagaaatgttaaatgctgatgctatgggatttgatttcataggtacaacacttgtgggatatacaaaccaaagtaaaggattaaaaatagaaaataatgattttgaaataattcgaaaagttttaaaattagcgaagcatccattaatagcagaaggaaatattgatacccctgaaaaagcaaaaagggtaattgagttaggagcatatagtgttgttgttggatcaattataacacgaccacagataattactcgttcgtttgttaatgcattagaattggataattgattcctattttagaaggaggatttgagaatgtgtgaattaaaaaaattttgtggaattatacctgcattttatgcctgctatgatgatcacggagaaattaatatagaaggtgtgaaaaaattagttcgttattttatcgacaaaggagtagcgggaatctatgttaatggatcatcgggagaatgtatctatcaaactgtagatgaaagaaaaaaaattttagaaacagtaatggaagaagcaagtggacgtatagtagtaatttctcatgttgcatgtaataatatcaaagacagtatgacattagccaagcatgctgaaagtttaggagtcgatgccattgcctctattccaccaatatattttagattaccagaagattcaattgcagaatattggaatcaaattagttcggcagctccaaatacggattttattatatacaatatcccacaattagcaggaacgacattaacagttcctttgtttagaaaaatgagagaaaatccacgcgtaataggtgtgaaaaattcttctattcctactcaagacattcaaattttcaaatctgaaggtggaaatgattgtgtaatctttaatggcgtagatgaacaatatatagcaggaaaagttatgggagctgacggtggtatcggaggaacatatggtgtaatgccagaactattcctaaaaatggataatttgttagagcaaggaaatataactgatgctaaaaaaatacaatattttgtgaatagaataatagaaaaactttgctccggtcaaggcagtatgtatgcattaataaaagaagttttgagagtaaatgaaggaatagatattggtgatgtgcgttcaccattaccttctatgacaaaatcagattttaaaatatcaatggaagctgccgatatgataaaagaagcaagagaattatttattaaataaaatatgatctctcggaatcttgagtgatcatgccagcaaaactctggcattgaactttgaaaagtaaatattattcttgaacgaaaaaatgaacgcaagaaataccgggagtgttaccaacttcaaatccactaaggatagcataaagaggattcattttaagctgagcagccaactccgttaatgaagtaactttaaagtcaatggaaagaagataagaacgctgcatgcaagaaggagttcgtggagttggtccgaattttgaatatttatcagccataaaagtatcagtaaaagataaatcgagattccaaaaccgctcaatgatatcccaggtggaacgagcaagagcatttggattaggataatatttacgaagattagtaacaacaaggttttggtagtcagcatgactgccacaattaacaggtaacataaaaatcgccctccagtcgataaaataaaatatattcaatcggcttcgccgcaaattttgagcgatttgtcaagtgtttttaacaacaaaaagtgggggattttaataaaaaggaatcagaaagccttgaatttactgggctgaagattccgagagatcataaattattaatggaggattggttttgaattattatttgtgcttcgatataggaggaacagccattaaatatggaataatagatgaaaatgcaaattttctagaaacttatttaacggatacagaagctacaaaaggcggacagcatattcaagagaaaatattaaagttgatcgatgatatagttcgacattataacatttgtggtgtgtgtatatctactgcgggaatggtaaacccagaatccggtgaaataatatatgcatcaaatacaattcctaattatataggtatcaactttaaaaaggatatagaagagttgtttcaaattccatgtgaagttgaaaatgacgttaattgtgcaggaattgcggaagttttttcaggtgttgcaaaaggagaaaaatccgtattttgtctaacggtaggaacaggaataggtggaagttttatccttgatggtaatgtatacagaggaaatacaggaagtgcatgtgaaataggatatatgttggatggaaatgtttcttttcaagatagagggtctatgaaaacacttgttgactatataagaaataagaaatgtgatttgagttggacaggtgaaagaatattttctagtgcaaaacaaggtgaccctgattgtgtagaagctataatatctatgttagactctcttgctcgtgggatttccaacgtttgctatgtattgaacccaaaggttgttgttttaggcggtggatttactggacaaggacaatggttggaagaagaaattagaaaaaatataaaaaaatatttacttccaattatatttgataatatggagtttaaatttgcattatataaaaatgacgctggaatgataggagctttctacaactttaaaaatcgtcaaaacctttaaaataagcatgtgagaaaaacaaaaagtaaaaatcatgagttagtaattgtaaaaagtattttccgtgaatacagttatgaatttgttttttgatagataacaggtttaaaactatcgaatattcacccctaatactagtgtagtgacctgttgatgtttagctaaatatttttaccatttactgccgctctgatgtataataataaaaaagaacggcggtgatttctatggcaagacccaaaaaatataatattcagcttacagataaagaacttgcaagattaagatctgttattcgtaaaaaagatacttcaagaacgattcgcagcttcatccagatcattagtgacctggatgaagcgcatggaaaagttttaactcatgaacaaagtgcaaaatctaatggtgtctgcatggcaactgttactaacactgtggcaaaatacatcaatggcggcattgatgccgttactgaattaaaaaggaacataaattcagacaatgcaagacgtaagattgatggccgtgcagaagctcagttgatcgaacttgcctgtggcctcgttccagaagggcattcccgttggacaatccgtctgcttgagaaagaatccaaagtcattttagaaactcctgttggcagagaggcaatccgcaatgctttaaaaaaaacaaacttcgaccccacaaaaacgactactggtgcatcccctcaaaagaagacacggaattcatagctcatttgcttttgtggaacctctcggtggtgttcatcatgtaagtgtccgggaacaccgtacagctgttgactgggcagaggagatcaaatatcttgtagatgttatgtatcctgatgccaaaaagatcatacttgtgatggataatctgaatactcataaaccctcttctatgtataaacgatattctccggaagaagcaaggcgtatcactaaaaagctggagatacattacacaccgaagcatggaagctgtctggatgttacagaaatagaactcaatgtaatgacccggcaatgtctcgaccgtcgtatttctgatatagaagaactacgctgcgaactatctgcatgggaaatagagaggaatattctggcagcaaaggtcaattggcattttagaaccaacgatgcccgaataaagctcagttcattatatcctgcatataccacagcctcttaatgaggcgatagtattgttaaatatcaacaggtcactacactaggttacaaaaggagaaattatgaactatttaaaatcagttattcctattattgaagccaattataaaaattttacttccgtagaaaaaaacattgcaaattttttcagaaataatgaagaaataatggatttttctgcaaaaagtatttccaatagattatttgtttcagaggctgctttgtctagatttgcaaaaaaatgtggttacagagggtatcgagaatttatttatcaatatgagcagaatttaacagaaagaaatttaaagattgttggaaatgcaggatctgttttaaatatttatcaagagttattaaataaaacatatagtttgattgatcaaaaacagattatgagaatatgcgaatatatggcagatgcatcaagagtttttgtatgtggaaaaggaagttccggattagctgctatggaagcagaaagtagatttatgagaatcggtgtagatatagactctattaccgatagtgatataatgagatttcaaacagtttttcaaaattctaaaagtatggttattggcattagtgttagtggcatgacagaatctatattatactccttacaacaagctcatgaaaaaaaatcaaaaacagttttaattacagcacataaaaatggaaggatttcatcatattgcgacgaaatagtactgataccatctttaaaatatcttaactatggaaatgttatttctcctcaatttccaattttaatatttttagacataatttattcttattatgtttcaatggataaaagaagaatgcaagtgctacataccagtacagtaagagctttgaataggatacaagaagaaagcatataaaatctagaataaaaacagttagccattttgagcttgtaaaaaacaggcatgtgtcattttgatgttcatcttaattttgtggctgacttgaaaaagtaaattccagtgcaagagtaaattccatcgtgatttaaattttgttgatttaacgagagatttttgaactacatctctcgttttctgctataattaatgcaacttatcgaaattttctcgatttcaaggcatgctaaatgggttactggaattcggtgtgctagactaaattccaccagctacatcttaaaaatgtgaaaagtttacatccagtctgacagcagatttcgattagttttattaacggttaaagcgcatcagcttaggcgtcagattaaccttatccggttcaatcggcttaagctgaaatgcttttaagatatcttcaccaagcgtttctaatgcaacttcatatggtgtcctttcaccgaggatttctcgcggagtggagttgatgtggtttacgatgagattcacatcccattgtgtcaagaattcaaaagaagttcctttaggtaaaaccatgcgaagcattgtgtgtgtttgttctatagcgcctttttgcacgctgcgcataggatcacaatagtagatactgcttctctggattccctgaatacctgtttcaaggcttaccggatctcctgattcggaacctctatcggtcaatatattttcaaaaacggatataaattcgtatgtgcccaagcgcttctctaaacggtcaaaggtaaacgtcaaaccactcgccttggcgaattagtttttttatgagacactctaaaaaacagtaaacagtaaatagtaggtaccacgatttttactaagtattaatgatggatccccagcaggtggaaccggaatgcagtattttgtgggagaattcgatggtcaaaaaattatagtagattcaaagcaagagaaaggtctttggatagattatggaaaagatttttatgctggagttacgtggaatcatgtacctaaagacagaagattgatgattgcataggctgataattggcaatacagagattatcttccaacaagtccgttcaagagtcagatgtcttgtgtccgtgaattgaaattagtgcaaaaagagaaaaaatatattttaaagcaattacctgttaaagaaatggagtgtttaagaacaaataagcatgaaatgaagaacataaagatgggagcggatgaagagtggacgctgtgcgataagaaagaagtactagaactagatatatcttatccgattgaaaagattcatgcgcaaacgtttggaattaaaatttcaacaggaaaaaatcgacaatttgaaattgtattctgtaaagaaaaacaatgctgttttgttgatagaacaacaacaggagtaaatcctcatgataaatttgcagacggagaggttgttatgtcaaacttactttttccggaagatttttataaagttaaattatttgcaacaggaggagatttggtaattgaaaaaagtataatttatgagatggatgaaataatgaaccacccgttggacggaaacctgatttgaaggaaattgttcataaaaacattcatctgaagttgtttgtatcctaatctacaaaccctcttacatatacaaaagatgaaagggtaaaatacagggtgagagaaaagaattttagaaaattcaaaataacctaaaaattgacttataacatttgctaagttaaaatgaaataaaaacaggtaagtaaatagtgctccagatttcagtgtagatagttgagaggaaggtattgggtatggcaaaaatagaaaggtatataaatgaagattttgatcagttactttccaaaattgagaacggaataataaatggcagtatgtcagcaacgttagaagatgccagtgactttcgaagtggaactgcgcgttgtagcgttcgtgtttttgagcgttacagctatgccggaggaaacagagtgagtcttaatattacactttttcaaaatgacaaagatccagttcaactttccgcaattacagcgggaggaagccaagctgtatttttcaaaattaatacatggggggaagaggcatttctcgataagttaatcgagttgttggatttcgctaattgataacttcacatttgtaggatcaataagctgttcatttgaggataccttcaattatgctgataaaaacggtgtaagacgaggatatggttacgaactcatgcaggctctggcgggctataccggatggaaagataatttgtacttttaaagtaatagttgaagttcgtggatgttgtatatcaagtattggatttcacagctttttacatataataaaaggaaacaatatgaaaacaaaccatataatgggctgttttcataaacaagtagtgaatgtagattacgaatgtccgtctcattaaaggaaggagtaagatgaagaaattaaaaaaacaatggaataaggtaacggtacttttgctgacatttgggatagttttcggattatttggggcaatgccggtacaggcgcaggatggaactgcatctggaagtacaatttttgatgtgaaaatcgtacataccaatgatattcatgcacgggtagaggaagatgattacaatcaggtgatcggaatggatcgactgagtggaattgcacagacatttacggaaggagcggacggttcgctgatgctggattccggagatacctttcatggacaaccgattgcgacaatagtaaagggagaatcggtggcaaaactgatgaaagcttgtggatatgatgcgatgaccacaggaaaccatgactggagttatggaaaagagcgtttaaaagagcttggtggaattgctaatgtcaaaattttatccggtaacatcaaaaatgcagatgggacatccttttttgatacggatgaacttgtaaaagagattacaaaaaatggaaaaacattgaagatcggtgtgtttggtgtaagtgatccggagatgaaaaataagacaacaccatctaatgtggagggattggactttcaggatgcagtagcttatgcaaaaagggaagctgctactttaaaggcagaagggtgtgatgtggtgatcgcattatcccatacgcttgatccaaagaatgtggctgcgcaggtggacggtgtcgatttgtggctgtgtggacatgaacatattgaactcagtgaatctgtgacgacaccggacggttcaaaaacctatgtatcggaaagtggacattatttaaatagtgtggggctgatcgatctgaactgtactatggatgaggatggaagtgtgtatgtggattatgagaaaacatctgtcgattatgaagcagcacagaactatccgaaggatgcttccgtgacagatgtattggataagatcaaagcagaaaacgagacagcactgaatcgtgtcatcggtacttcaccggtggaattggacggtgtctgggaacatatccgtatcggacagacaaatcttggaaatgtcataactgatgcgtacctgcttgccacaggggctgatatagcctttgaaaatgctggcggaatccgtgcttctatcgctgccggaacggtaacgtatggagatgttatcaatgtcagtccttatggaaattatgtagtgacaaagaagctgaccggtgcacagataaaggaaatgttggagagcagtcttactattcagaaaaactgtattgttgcaaacgacagtggtgaatgggatgcgtggccaaatgacagcggaagttatctgcaggttggtggaattaccgtccgcttcgatccggcacagccggcgggggagcgtgtgctttctgtgcaaaaagatgggcaggagttggatgatacaaaagagtatactgtagcagttaataattatcttgccggttctgacagctatccacagcttgccaatgcagcggagatcggagaatattcctgttgcgaagagctgttgattcaattttttgaacagggttccgatgcagttactgcaagtgtagcgaagcagaatatgattcagacaaccaaagagacagtcgaaccggaacagccatctgtgcctgttacaccgtctgtaccggagcagccatcgaaagaacagccggaagctgcgaaaacagaggtgaaaaaagaacaggcaagtggaacaaaaacttcagtaaaaagtccgaaaacagcggatagtaatgaactgttctgctggatgatactactgttgctcagtggcggagcaggaagtatctgcctggttcaggaaaataaaagataatttaagatgaagcaccagaaaagcaggaaatacattacatctgcttttaagaacgggtcaaaaagtgcggaagcccttaaaaatcaaggacttccgctacttttgtttataaatgtttctatgatatttttattgtttgcttaactgggagcagttttatttttggttttctgcctgatatttcttgtattcttctacaggcatatccaggccggtatataatttataagccgcaacgccctgccacagaagcataccttttccaccaattgtttttgcacaaccggcttcttttgcttcccgaagaagttttgtctcttccggattatatacaacatcacatacaatcagatcggaacgaaatacagatttgtctgtgattggagaacgatcttcatgaggtttcatacctaccagtgttccatttaccagaatatctgctttttcaatttcttctttcagttttcccggatcatccagacagaatacctgaacattacaatctggtacttcgtttttcagtttagcagctgtgccttttgcgcgatcaagaaatggatcgtctggattgaagatggaaatggatgttgctccatcaagtgcacactgtacctggatggctgttgcagctcctcctgcacctaaaatcaccagtttctttccttttacatctacgccatggtctcttagattttccacaaaaccgataccatctgtcatgtgtccgatcagttttccgttttcattaacaattgtattcactgcaccgataattcttgcagcaggtgataactcatccatgttttgagctgctgccgttttacatggcatagttacattgcaccctctcattttgaacagacgcatcgcatccaatgctgccggtacctgatcttccttgatgtcaaaagccatgtagctgtagtccaaattgtgataacggaagcagaagttatacatatcaggagatcctgaatgtcctactggacttccaatcaatgctaataaacctgttgttcctttaattcgctgttccatttttttcctcctgttctgggtctgaatccttagatgcgacttcataagctgtttttatttattatccatctgacgtagtctaagaattagttcttcgcagatctgcaattcatcttttccgtctgtttcaataataatatccgctgctgcttcatatttttctctgcgtttctccataagatcggcaataaacggaactgttttgttattttcaatcagcgggcggtcatggctgtctttgacacggttcagaatagtttctggtttggcagtcagaagaactacacgtccgtttttcttcatctcaacgacattacattctctcattggagttccaccgccacaggaaatcacgacattcgttttggactgcatttcaataagaaggttggtttccaggttgcggaaatactgttcgccatatacttcaaaaatatcggaaatagtcataccttctctttcagctatgatctgatccatctcgattacttccattgcaaaggagtttttcaaaaactctgagatggtacttttaccggttcccatgaatccaataagcacaatattatagttaaacaattttctggactggattcttttactgttcattgtgatgcttccaaatacgtcttctacttcagctttatgacgttttttttccattcttttttccagccattctttctgtttggcctcttgttccggctgtaagattggaagatcattggacttcttataagccatgatatcttctacaatacgattacgcataagcaatgcatccaggatgatttcatcacactggccaagactctctcttaatatttctaactgactcattttatcaccattcctatctgattatcatttttaatattataacagctgtttttgtatacgacaatacaatttagtgattttctgctttaaatcgctaaagctttttggaatattaaatacttttatttacagatatttgacaaaatgttatggtgcaaagaaaaaagcttaaatcatataccttttgatgaaaataaaacactgcagaaggaaaagagtacagcaatatttttgaaagataaataaatcaaatcatgtcagaatgtgttgacgtgtaatcataatgacgctacaatcattgtagatattgagaggatactaaggaggaaaatcagatgaatgcaaatctagtttatgtggatgctacagatcgtttccttgacaaattagcaggagttgaggatccggaagagaagagaaagattatcggtggagaatttatcgaagtatttgctgaagaagcaagaaagcttgatggtatggtttaccgttagccattcccaggaccgggacttggagttcgttgtccgggagctatcacacgtgatcgtttggaagcagtacgtgaatctgacgcaattcttcgtgaggaatttgaaaagaacggatttgaaggaaagatctggcagtattttactgttgttttggcaacaaaatggcaacattttgtgattattcaagagataaaaattttatttcataacgtatataaagagagtatgaaactttttctgtaaaataatgtttataaggttcttctatgatacaataaatatcattaggagggccttttattatggcaagacaaaagaaacctgtacatcgtgtacaaatgacagaaggaaaacgaaacatcatccatacttataagacatggatcgcctaagagcggttactgggagattatagaaaattagcgggatgatagaaaatgaaggttaaattagaagatgatggcgaagataattcagaacttattgaagaaatagaagattcatttatagaagagtatattccattaccaggacagtatgaaatcaatgagtacaggattatggaagaatttatatatgacctgccagaaggcagaaatcaagacacattagagagaacaatacagggaagataagattttacctcttactgcaaaagaacatgatattttactggattgctatcggactaagcttaggtatagttattgggtttctaatagatgatattggtcttggaatgtgtctgggggttatgatgggggttagcatcggccctgcaattgatgtgctgagaaaaaataagaaatcagaggagcaagaggataatgatgagaaagaataatgtgcttcgcaaatatatagcgtcacttctattatttttgttatttgagacagtggcaatcacgttgtggaaggctaaaggaaacttgttttatctgttgaatttcagctacattggaggatgccttgcgttggaaacagcactttttactgcaggaaaacgctatgcccgacattttcttggtgtttttgaggcggcaacaatccactacgcagtcgcgaagatattcggtccactgtttttcaatcctgcgtgttcactgcgatgaaagcaaatgtgttcattgtggaaatgtctgcgtgtctgcctaaccaaagcattgcattaaaaaatggagttggagatatagctgcaatggcaaagtcgagttttgtacatacatcaaaaaataaaagatataatttgggatggagattatgatatactgtaaacaagatatagtgcaaaatgtaacaggaaggagtacgcacagtgtcagagaaaaagaagtttacagtatacgtcggaagtgtagcactatgcgtaggtgtggcagttctgcttcattatgtgtcctttaccaatccttatctgcaatctatttgtcaccttttaagaccttttatttatataggactttatctggtatgggcgatttcttttcaaaagagaattatccaaaaggaaccccgtcgttgtttaataatgattgcagcgatgatggttttttggatgctcgttcgtatgtgtaaatttgaaataccgtatgagatgccgacagcactgcgctacgcctggtatctttattatattcctatgctgttactccctacggtcagtctttatctggcattttatatacgacagccagagaattataaattaccggaaagatggtgtctgctgttttttccggcattgtttctgattgggcttgtattaacgaatgacctgcaccagttagtttttactttcccggaggggagactgggggaagcagcttcctatgaagtaggagtctatggatatggagcaatgtattatgctatagtcgcctgggatcttggttgtctgctggtggcactcttgattattctattaaggtgcagaaaaattaaaaacaaaaaaatgctttggatgccttttggtgcttatggtctgtcggttgtctatggcatcgcctattatctgaatctgcccttctggaaaatattttcaagcgatatgacagctgcattatgccttctgtttgctttgatcattgaaagctgcatccagtgcggattgatcccttccaatacaggatacgcacagttatttgcagcatctacaatttcagcacagattacagatcagagtggaaaatgcatttatcaatctcaggattcggaatgtattgcaccggaaatcgtaaggcaggtagttcaatgtccgatcatgttagaaaatgggatcaggctgtcgggaaaaccaattttgggaggctatgtgttgtggaaggaaaacctgtcagaattacaggaaatcgtaagagagcttgaagatcggaaggaagaattaaaagatgcgaatctgattgaggaagaaaatctgagaacaaaaagagaagtagaaaaactttctgtgaagaatcagctgtatgataaaatacagaaacagacggcaaggcagagtaaacttttgacggaattcattgaagcatattctatggaagaagatgagaacaaaaggggaaaaatattagggaagatagttgtgatcggagcctatataaaaaggcgtagtaatcttatttttattgcggagcagacagtaaaatttccgataagagagttggagttatgtttcagggaaacgataaagaatctggaatggaatcatgttgaggcaggtttttccaccgctttagaagaaataagaagtgaagatgctatgcagatttatgatttttttgaagcagtcatagaggaatctttggaagatctgtcggcatttaatgtaaatctgaaacgcagagaggcgcggatcatcatgtctatgagtgtggaatgtaaaacagatctgcaggaaattgcaagacgatatggagcttatgcggagcaggattttgacggatcatggctgctttctctgattctgggaggaggtggcggcaaatgataaaaacatttgaaaactgttcaccggagtatccgattacgattgtttgtttttttatttttttgactttgctgtgtatgattctggttatttatgaaggaacaggaaaaagacaaagaaagatgttgctgctggacagtgtattgcttatagttattttccttataacagctgtcttgtgtgtgtggcaacgggcgttttacgaagaagattccatgatattatttaaaataccgtatgtgattttaattgttataggaattggtgtttttttatatgtgggattgaagatttttggaatttataagtaccgcaagagctgcctgagggaaaatgcagttcaggaaagtctggataatttgccgagtggaattgttttttttgatgggaacggaatgcctaaactgatgaatcgaaaaatgtatcaaatttgtcagaatctggcgggaagagatatacagaatattacagaactggaggaagcactgggacatcctctgaaggaaaatgtattttatgatgttgatttgaaagtatactgctttgcggatggaagtgtgtggaaattttcagagaaagagattattacgacagccggagatcatttttttcaagttcttgcttctgaagtgtcggaattatatcggaacaaagtgttgctgaaggaagaaaatcagaaacttcaggaaatgtctgtggctatgaaagaactttctaagaatgtaataatgctgaccagagaagaagaaatgttatctatgaaaatgagagtgcatgataatctgggatatagcgtcctggcggcacagcggatgttgctgcgcgaatcggaagcagaccgggatgttttcctttcgcaatggaagcagacattagacttgctgaataaagataacgagtctgtggaaggcgaacaactgcacaggcaggtgcaggaaagagcggagattttgggtgtgaaaatcatttatataggagaaaaagtctgggaatctcatatttctgagctgatggatataatacttttggaggcactttccaactgtgttcgccatgcaggggcaagcgaactgtatgtaaaatgcagtagtggggaacaagaatggattatggtgattacagataatggacaaacaacggagaaggatgtcaaagaaggaggaggattatccggtatacgaaaaagggtggagcaatgtggaggtacattgagaatttgtgcggagtcaaaattttcaataatcgttaagataccaaaggaggtgcggagatgatacgggtactaatcgtggaagaccagcgtatggctcgggaagatatggaaaattatattcagtccagtgggagatattgtctggcggcttctatcacaaacgcagctatggcagaaaccgtatgcagacagagcaggtgtgaacttgtcttgatggatgtctgtacggagaatgatgagagtggtcttgtggcagcggagaagattaaaaagacaatgccccagataaaagtaattatcgtgacttctttagtagagtgcagttttattgacagggcgcgcaaagcgggagtagaaagtttttggtataaagatgccggtaaagaagaactgttggaggttatggatcgtacgatgaaaggggagagcgtgtatccggatactccgccggttgtgatgatcggaacggcgaaaagctgtgattttacacctggggaattagcagttctgcgattagtggtggaaggggaatcctataaaaaaattgcagaaagtttgtgtatatcaccggagactgtaaaatggcatatcaaaaatatgctgcagaaaacgaattttgattccaaaacgaaattggcggtagctgttacaaagaaaaatctgattataaatggattttaaaaatagcattttactacccatatggggagtgcttaagactctgaaaaccgatatcatatactatgtaaaagtgtatcaaacctatggttctgttccttgttgagatgtcagattgtttataagacactgtctggaaaggagaaaaataatatgagatgtattatgagaagaatctgcctattcctggtaatgattgcggttatagtttttacagggtgtgggcagaagaaaaaagaagatccagtaaccgttacattgtggcatgtatatggaggacagacagaatcgccattaaacgatctgattgatgaatttaatgaaacgattggaaaagaggaaaatatccgggtacaggttggcagtgttacaaatacgaatacgatacatgaaaatgtactggcatccgcatttggagatccgggagcttccaaactgccggatatgtttgtttcctatcctaaaacagttctggcgatgccggatgatacggaacttgtagattattatgattattttacagaagaagaattgaacgaatttattccggcctttttggaagaaggtgtcattcatgaaagactttctattttgccggtagcaaaatcaacggaagttatgtttatcaataaaacagcatttgatcgttttgcgaaagaaacaggagcgaagatggaagatttaaaaacatgggaaggactcttcgcaatggcagaacaatatgctgcatggacagataaccagacgccggacattcctgatgatggaaagaattttttcgttcatgattatcattttaactattttcaggtaggtgtagaatctctgggtgaaaatttttttaagggagaaaatctggctttcggaccggaatttcaaacagtatgggaaccttatgcaaaagcggcactgtccggaggagtatggcttcgcagtggttatgcaacggaacctttgcgaacgggagattcgattgtatcggtggcttcgtcagccagtgtgttatattattctgacgaggttacttatgcggataacacatcagaaaaaatagagattgtttctatgccatgtcccgtattttccagaggagaaacgatggttatgcagcgaggcgccggcatttgcacagtaaaatctacaccggaaaaagaaaaggcctgtattacgtttcttaaatggctgacagaagcccaaaagaatgtagaatttgtgaccagtcttggatatatgccggtaaagcaggaggctttcaatatttaccttccggaggcgatcgagaagttaagtgatccgatgtatgtatcactttatcaggcttttttaaagacgcaggagaattatacattttatactgctccgcaattggattcctatctgtatctggaaacaaagtttgaagaacttatcaggcaaatcttgtcagtaaagcggttggagtggctggaagacccggaagatatggataaacttgtttcagagacattagaggatttcaaagcagcatacacacaataatgtctgccggatcggcaaaaagaggtggctgacatatgggagaaaagaaaataaatttctggaagattataaaaggaataaagagacaaagcatccgtatgcagcaaagactgattgtttattggtgcgtggtgattttaacactttttttagtgacagttctattactcagtattttgggagtccttccgggaatggattttaaagtacgagaaatgttgtctgcccagcagaaaaatacgttgtcaactatgacagagcagactgatattatgatggcgagaagtatttctttatcggaagacattacaaaagaattgaatcaatgcctgacagccaatggaaagacattttcagatttgaatgataatcctcagttgattatggatttggaggctgcgttgtatccctctttgaaatcggcattggacgtgaagtattgcagtggagtttttgccctattggatgcaacggtaaatacgaaaacggaatatgcagatacatcccgcatgggaatttacctgcggctgtctgatttaaaggcagtaaatacaagcaaacagcacgtagtttttttcaggggaaatgctgatattgcaagagcagagcagatacagctccataaccgttggaatttagagtttgatacgtccgcattgccaggttatgaacagattatgaaatttgatggaaaccggctggtagagagctgtctgtggacagatcgtctggagctgagtgatacatgggaggatgtgcagcttttatatgtgccggttttagacagtaccggaaaagtacgtggtttgtgtggtatggagatgagtaatctgtatttcaggctgtcttatcctatggtggaaggttcctgtgggaatatagtgacagtactggctcctatggacgaagaaggaaacatctatctggataaggcgatgtttggagatacaaaagaaacgtatctttcaccatcaggaacgatgacagtgaagaaaggaaagcattataatacatattctaccgctttcgggaattatataggcaggcatgaactgcttggattgaagagttgtaatggtatgccgcttgcggtactgacattaatatcagaagcgaattatgaaaaattaacagcggacaatcgaagggactggatcatcggtacgttgttgttcctgattttattattgattgtttctgtcagtatgtcccggcgttttgtaaagccgattctgcggagcttaaaagcactgcaggaggatgcattgacggacgaaaacttatcaggaatttcagaagtggatgccctgattgattttatgcagaaaaaaagaaatacagagaaactggaaaatggcggcattcctccgaatatagaagaaatgctcaaggcgtttgctttgcgcgtggaaactctgactccgtcagagaggatggttcttcagtattatgttgatggatacacgatacaggagattgcttctttgctttatatcagtattggaacagcgagaaagcataatacaaatatgaatcgaaaactggggataactgtcagagaggaattaatgctgtatattgagttatttcgaaaatgtaatcagttagataagctgacatatagcagaactgagtaaacgaaaaagagtctttacaggctctttttttagtttaaccgtcagacatcttttgcatttttacaaaaagacattacatatatagtggataaataaaaataacatactatatatagtatactaatcattcgtattttggtgaataagaataatatacgaatggcgaccatagtatttgctttcggaatctgctacgcttttattacgaaatagcggcctcccgatcagagaaaaaaataaaggcaatggataaggagggaaaacagagaataggatggagatagagcaaagaggttaagaaggaggttaaaaatgtggaatatattacgaaaaaggatttaatagattgttctacgccggatgagttttgcttttcactatgctgcatggaatgtaaaacagtatggaaaagtacaccaattcgtttttccagagcggggaaaaaaccggaaaatgaaaatcggaagattatttatgatacgctttatgaccgggaaaagaatttagcatttcaaaaagcattgaatcaggcgaaagagatctttaatatttgtccgatatgtaagcgtcttgtatgtgaccattgctttttaatctgtgatgatctggatatgtgtgtgcaatgtgctacaaagcttaatgaaaaaggtactgttgtaggatgaaaacaaaaaagaaaaatgaaaaagaaaggagaactttgttatgaaaaaatatgagattttaggaggaaatttaccagttgttgtatgtgaattatcagcaggagaatctatgatcacagaaagcggaagtatgagctggatgagcccgaacatgaaaatggagacgatttccggaggcggaatgaagaaaatgttcggcagactgatgtctggtgattctgtgtttcaaaacagatataccgcagaaggtgcagacggaacgattgcatttgcatcaagttttccgggagcgatcaaagcactagagattagcaacggtcactccatgatcgtgcagaagagtgcattccttgcttcagaagaaggcgtagaattgtccatgcattttcagaaaaaattagggaaaggcatatttggaggagaaggtttcattatgcagagattgagcggaaatggaaccgcatttgtagaaattgatggacatgcagtggagtatgatttgagtgcaggacaggagattttgatcagtacggggtacttagcggcaatggaagaaacctgcactatggatgttgtagctgtaaaaggagtaaaaaatatgctgattggaggagaaggcatttttaataccgttgtgaaaggaccgggaaaggtgatcttgcagacaatgccaatcagtaaggtagcagaattgctgactccattttttgcaaataataagtaattgaaaggggagaagattatgagaaaaaagttgaatttgttatttggactagtgcttatcatcagtatgatagtattgactggttgtggaggttccggagaaacaggagaaaagaacccgtatgaagggaaatgggtagcggtgtccgctcagatgataggaatgtccgtcagtatagatgaaactttcggaggtgcttttgaatttgaagtgaaaaacaacggaaaagtttccttttcagttggagacactaccgggaatggaaaatggtctgtcgaagatgatcagtttatcttgagcatcgaaggagaagagatggtgggaatcatcggaaaagatattatttcttttgataatatgctcgagatgggagtaaaggtgatttttgcaaaggatggaacggatgcaatggatccggcactctatctgacagaggaggaaaatgcagtcataggtgagtgggctgcagaaagcgtggaagaacttttaggagacggacctcagacttctatggaaggagtagacaacatcaatgatgcactgcgtcttgatttcaaaagtgaccgtaatgtaacagttatttataaaggggaggagattgggactttcccatggtcagttgcactgggatattgttcgattgaatcagaaaatccatttcttacagtgatgataaatgacgatggtactttgaaagtagactacagtgatgatgatgactactacacattccactgtgtaaaaagtgacagtgaataactgaaaaggatgtggaaatcatgaaaggagggaagacgccatgaaaaagaaactgtggtgtgtgctgtgtatcatgatatgcatgatgatgatagcggcatgtggacaaaaaaagaatccggagaagaaaaaatcggaaaaagcagagcaggaagaaacagaatttaaagacagagaaagtcttaaattaagtttatttacagtgtattatccaaaggcatggaactacgataaagagaatatgaagaaagatgaagaatattcttacgttagattttttgatggagatacagcagatggatccgagaatgtcatttctatagaagcgaccaaggaggattcatatacatatcgaaagagtttaattgcctttggagtggatttagaggcatatgctgaaggaaaaatggacactgtaacaataggaaatgcagaatatacagcaatgccggaaagtaattccatagaaaaaacgtatatgtatcgttatgaacagtctggcacatcctatgatatcagagtaaaaggacaggaaatagatgattctgacaaagaattgctggaaggaattgtgctgaaattagaggatgaaggaaataaagacgcaccatggccatgggagggagagcctcttgaacctgtattggcagagcagatgataggttcttatacaatcgttccggaatatatcccatttaaagaagcacagggagttatgcagattatggatcatcagtttgtaaaacagggcaatcaagtgttccatttgctggagaacaaactggatacttatgaatattcagaaagtggacttgaattcgtatcttcgatggaattagacgatgattttgaatatttgtctggggacagcagtggaatgttatatctttcgcctggaattggagatgtaattggcgtaaaagatgggaaaaaggcacttcagacaacagtagacggagatctgaatatgcatccatccggagaatggggaatcagtttctgggtgaacagtgatactcagaagattgcgaatcaaggcggtaacctaacgacagaaccgtggatactgaccggattaaataacgatgaagaacgcaagggactgttttctatgatagatgacgtacagatcacgaatagtcatattatggttgccggctccatggctgtggaagatgaaggcacaaaaattgttgtctatgattatgatggcaatcagcttttgaaattaggtggagaagatatcagttctccggacaggctcggttccattacaggcatggcggaaacagaaaatggttttgtggctgcagatggaaatatgcgtgaaatacaattttgggcaaaagatggaacgcacgtaggtgcaatttctacagaggacatatttggtgtcagttatccatggctggaagatatgcagcttttagatgacggctctctgttaattatgctgacacaggaacgagacgacggatcagcaaatgaattgatgtttttcagattgacaggattttaattgaaaaaataaaaatcgcttgtcggcagaaatttatctgccggcaagtgatttttctggttgatttcctaagcaaaaccgcttataatctgaatcggaatatattgctattatccacagctacggagcgagtgttatcaataccgataacaaattgataacattaacccgtataggcaggataatatggataaatcaaataattgaaagaaaagcgaacacggcaataaataatctctaaacaaaattgattagtaattgtcaagtttgaataatattcgcagcatctatataacaagaaagagaagcatcatatgagacatacatttacattagctaatggagtggaaatcccagcagtggggtttggaacctataaagccgcagacaacaccgatgaagcaattataagtgaagcaatccgacatgggtatcgccatcttgatacggcagccttttatttcaatgaagaagcagtaggaaaagctgtgcgcgagagtggaattccacgagaagaatttttcctgacatcaaaggtatggaaagatcagcttggatacgattcaactttgcaggagttcgaaaacagctgtaaaagattaggtacagactatttggatctctatctgatccactggccaagaccttctgatctgaatgcagagtggagagatttggatgtggagacatggaaagcactggaagatctctataagtcgaaaaaggtacgggcaatcggtgtcagcaattttctgccacatcatttaaataatctgttagagcggacaagcattactcctatggtgaatcagttagaattccatccgggatatatacagaaggctgcagtcgatttctgtaaacagatgggtattcagatagaggcatggagcccgataggtcgagccagagttctcaaggaaccatttcttatggaacttgcagaaaaatatcaggtatctgtcgcacagatctgtatcagatttgctctgcagtgcggtgtgctgccgttgccaaaatcttcttccggtgaacgaatgcatcagaatctggatgttttcggatttgatatagaggaaaatgatatgtatcagttgatgactttaccgcagatcggataagattttaatacaaagaaaataaagctattgaaaatgacacccctaaatgaggtgtcattttcttataagagctttttatagaagagaagtagtcgtttatacaacttctgtcataatctgaatgtctgctcataatttatttcttatttttaatctggccatatttgtagagagcgaccatagcatttacggcttgttcagcagtcggataagctgggattccatgatctctcaacttcatgatagcttcctgacattcttcaccaccctggcattccataatgaacggttttccaagatgcttatatgtctcgtaaatatcgataaccagatctgttacagccggaacatctgttactgctgtcggacagatggatccaagtattccatgtacattcgggtcacgcattacctgtgtgaatgcacctttatactgaacaggtgaagctgttccagaaatatcaacaggattaagcggagaaccaaacattggcatatatgcacggattcttcctgctagattaggagagatctctgccagctcatgcattggcattccccgacgttcaaagtgatcacagctgagaagacccgaaccaccaccgttggtaatcataacgatattgtcaccctttggtgcaggctgcattcctaatgccattgatatatcgagaaattcctgccatgtggtcgcacggatagctccagccttttcaaaaatatcatcataaaatgcatcatttgttcctttgttttcagaagcagtatgtgcaaatgctgctttttcaccaatctttgaaccaccgacttttattgttacgattggtttatcaacactgcgacaggcttcaataaatgcatcaggactatccagtccttcaatataaattgcaagacatttactgttttcatctcttccggcgtaggatataaactcgcagaaatcaacgtcagctttatttccaagtcctacgaagaagctcattccaaaatgatctttctgtgaggttccaagtgccgcaagcaagttggcacctgactgagaaatcattgctacaggacctttgattggaagataagggataaatccgcagttgaaattaaggtatggacttcccattcctacaaggtttggtccaatcagaggcaactcatgatcacgacaatattgagtgagttcatcctgcagtgttccacgtccgatttctttaaatgcacttgtggcaataacaacaatcttaactttcttttcaacacaatcttccaaaacagatttaacaatgtgtgcaggtacagcaagaaaagcaagatcgatttcatcaggaatatcctttacagtcttataagctgtaaatccggcaactttatctgctcttggatttacaggataaatctttcctttatatccccatgttaaaaggccatcaacaactttatagccgacttttgtagaataacggctggctccgactacggcaatcgtttttggatttaatgcatattgaagtttatcaacaacatattctcttggatgttttacgatcatattactgcacctcctctgagtcagttgagaaacgacattttacggaaccggattccagtctgttctgtaaaaagtcatccgtcataacgcattcttcccaatatccgttatcatcatcaagacgggctacccaacgtctgaactgtctctttgaatttgctacctttacttcttcaatctcagcgtatccttccaacattcttctgattgcttcgacgtcatttacctcagtataaacagtcagcatacaatcgtagaaagaatcaccgaactgaagaatgtctacaaattctggcataagtgagaattcatctacgatttctgccttcctgtaactcggaacattctggaacatacgaaccagatacatatgcattgatattccaagtgctctgtaattaatataaatcattggcagcataaattttcgttcatcaacacacattacaatgtcttttttcatctgcttgccatccaggccggataacttctccagtatgtcaaaatcaaacatatctgcgattgattttgtactgttaagagcttcgataatagcaaaatcttttttatctattttgttctgaactttaaggaatttcttcttctgttcttccccaaaaataaattttctgtatctgtcttccggaacatcccattgatttacaagtgattctctgacatctgccctgattggacaaagatgtacatattcaacctccggtctgtctttccatggctggataacatctgcaagaagattgtccagaactctcatgtgatttccgttaaagaaatcgaaatcgccctctgcgagatatcctgtacaaatatcatctttattctgataccatttggcaaattcagcttttacctttggatctgtaccgtcttttaatttgacaacccaataataaagtccccaaccgtaaacaccaacatttggattcataacgaacatgataagatgttcatcatacattcgttttaatcgatccttgatatcatcgggtttgattccggtttctttttcaatataatcgatattccaaacttccggatagacttgataaaatgacttcgcgacattgtatgctgcaacttctgtagcatcgagagaatatgttcccggttcagagtaaccgtatcctctaggtggaaaacagttttttttcatccatgcctgttgctgatccgttcctattgtgtataatgtttctcccatagaatacctacctccttctatttttatatacacgcttcttatatacccaacataacataaataaatccggaaaccaattccctccggatacgtttgaacaaagaagagacaattgttcaaaacgcctcatttttatgaaaaacaactttatttttatgtgaaaatatactataattatttatgtatagcggggtttttggaaatacatgaaggaagaaaaagcaattttatctaaagacaattttatacataattcgattaaagatgcatttctgcagcttcttttgaaaaaggactatatgcaaataaccataacagatctttgtaaatatgcaggtgtcagccgagggacattttatactcattttggtaacattggacaagttgttgaagaagttttttcagatgcattatgtgatattaaaaatatggcgttgctatcagaaaatgcatcgaattcaaatacaattgtcaggaaggggctctgttggcttttacgggaaaatccgaaatatcagcccctctttttttcagaagcattgttcctgccggcagtaaaacatacagttgttgcacttaaacaggattttcttgatgttatgctggataagacaagtttagatgaatccacactaactgatttactaaccgttcaaataatgggatgtctggaaatgtgcagaaaacatttaggaaaatctgatgaagaatggtgcagattccatacttgttttgatcttttccttaaagcaggttatgaagggattattcaaaataacaatgcttaattttttctgcgattaacgatataaataccggcgcataccaaaactaatgcaaccaggctgccaacattaaatgcctgttttacctctccgagtatcagtgccgataagatcacgctgcaaagtggatttacgaatccgaaaatcgcaactttggaaacatcattccatgcaagcagtatagaccagagcgtatatgccactgctgaaaccatcgcaaggtaaaatataattgccagacctccggccgttacatttcccaggtgtccgtccattccaattccaattaaagtcagaacaattccgcccatcgtgaactgggttccgcttaacactaccggtgatacttttttggaaaaaagattgatcaacacagtagacattccataagataattgtgcaatcagaataaatccttctccgatcagtttaaatcccatatccagggaatttcccatcagattgattactacaactcctgcaaatcccaatacacatcctgcgattttttggctcgtcatccgttcatttcgaaataccagacaagacaacaagattgcaataaaatttccaagcccggtgatgattccaccttttactccggaagtgtgtgcaactcctatgtaaaaaaagaagtattgccccactgtctgggcaagacacacaggaatggcatatttgaggagtgtcctatcaggaagcatcactttcttttccctgattgatgcaaaaattaataccagaatcccagctaaagtaaagcggattccggcaaatacaatctggcttgcagtgtctgaagaatctacctgcagaaagtgataccctgtcttaatcaccgggattgcacttccccacaggatacagcatacacaagcaagaagtgctacaataccggtttgagtcaatttgttttgtttttgtgacattttcttgtttctcttttcgtataaatttcgttatttcgattttttcaggttttatttttcaatatctgatatttattcgttgcataacgttcatcaataacattatcataagacggatacaatgccaagctgaattgataaagcgtcttgacatcaatattattttaagtatatgatgaaaaatatcttgttgcataaaagtatagttggctgattttaagaaattaggagaacgataatggatttgagtaagttatctatgaagaaaattcgagaactgattatttttacagtgctgcttgtagttgcattgtggaaatttgaagtagtgatcgatgtactgaaaacaatatggggaattatatttccatttgtatttggtggcgcaattgcttttgtaatcaatgtgccaatgagctttttagaaaagaaaattttcggtaagacaaaagatgaaaataaggtgggaaaaaagttagcaagaccgatcagtcttcttctcacaattatattggcggttggtgtgatcgcactagtaatgtttggtgtgattccacagcttactcggacaatgggaagtttgatgataagtattgcgaattttgttccacagatgcaaaactggattcgagatttttcacacaataatcaagaaattatgaagcttgtaaatcaggttcagtttaatcaagatcaggccattaaatggggaatcagtattcttggcagcggagcaggaaatatgatgaatacgacaatgtcggcagtgggctctatcgtcagtggatttgctacatttttcattgcattttcttttgcatgctacattctttttcagaaagaaaaattgcatgtacagataagaaaagtatttttcgcatttattccgaaacaaaaagcagaggcattcctgaaaatttgttctctgacctatcagacatttgcaaattttcttacggggcagtgtgtagaagctgtgattctcggaagtatgtttgtcgttacactcagtattttaaaaatgccatatgcacttttgatcggaactttaattgcatttactgcattgattccgatctttggagcttttatcggatgtgcagtgggttgctttttgatttttatgataagtcctaagcaagcaattttattcattattgtatttttgattcttcagcagattgaaggcaatctgatttatccgcatgtggttggtggctctgtcgggcttccgtcaatctgggtacttgctgctgttacgatcggtggcaatctcatgggaatcgtaggaatgcttatttttattccattagtttcggttctgtacactattttcagggaatttgtatatcttcgtctgaaggaaaaaaatataaaacaagtgacaaagacagtggtggaagaatatacggcagaggaaattgctgcaatggaaaaaaatataaaaaagaatagagaataagaggaaaacaaaaagcggaaaatctcattagattcagaggttttccgcttttgagtgctttgctttacaagagaaacgaaggagagtcgctatttgaagttttcttcatgatcgttttcttttgcttttttctgttttttgaatgttatttttttgatgcttttcttaactataactacgataacagctatgactgctgcacatacgataaggatcggtaatgcaccaagaattccaatgatgagattcctgaaaccgtgacctactttatacaggttgtctccgaatcgttctttgatttcttcaaagaagcctttctcacccgcgtctgtcatacgttcgacttcaaatatctccacatgcactgtgctgtaatcaatctgattgtccagaagtctaagttgactttcgtagctttctatttcatatcggatatcggataatttactttcaatggctaagaggtcttccatattttctgctgtagaaagcagctccatcaaacgtgcctgttccgtttctaaagcttttttatgactttcgacatctacatactgaagtgtcacatcttccacggattcattttcctgtgttacatttccaagttcaccaacgatatccacaaactcatttaacttgtctgccggaattcgtatggtgtagcttgcatatcgggttgttgtataagaataactattgccactgatagaagaattctcgacatagccacctagttcagtagtttttgtttttaggctattgagtacagaatcaaattcttttgtctgcaaagaaagagaaaccgttcggatcagttttcgtccgttttctacctgagcttccagtccatttccggaagcgactcctgcatcggctgtttctgcaggttcttcgcagtattcgttttctgaataatctgtaccgtagactgattccttggttgcactgtcctcggatgctgacattgatttgctgccacatccgacagtcaatagtgccatcataattgctgtgaaaaatgcgattcttttcttaaatttcatacaaacacctccattctatcagtaggtcttgagtgaaggttaaaaggggagtagatttactttacattggacagcttcttttttctcctttgtccatgtctccgcgtaaatagtgcccattaaattccatattaatgtcacggatctcttttttaccttcgatatactcatcgtacatttctgaaagtcttgccatgcaaccgtcgcagtttgcagaaatgttgcctaaagattctttcacgatctgttttctttcttctacagttgtgtcctttattaaaatgcttttgaattccatgatagttacctctgtttttcgtttagatttaatagctatttctattaagagtataacataaaacatgattaactgcatagtttctggagaatataaaatgcctgggaaaaagctctttaaaaatgggtttaattataagctataatgaggtacaatagaaagagttatcatatcagatttgagattgttttccgtcatcataagaggtaaacaacaaattggtattactggagaggcgtaggtatggcgaaagtacatggggaatcgaagctgacttttttagagtcgacgagtattatcataggacacggtgtgggatcgggaattctttcggttccattccttgcatccaggaataactggcatgatatcatctggattgcggcagtggcatattgtatgaatctgctattgcattttatgattgcggaactgtctttgaataacaatggcgcgcagtttatcaaatgctttgaaaatgagctgtttgtgggaaagctgaagatggcatgtacatggctggcgtttgggctgcttggcttttcggttgtagtgaatgtgagtggatttatcacaggtgcggcagcagtattttctgcatggtttcaccttccgtcagtggccggaatgctgctcttttatgtattggcagcaagtgtggtctatatcggaatgaaactggttggaatttgtgagaaaattgcagtgatttccatgtttggagtcatagggatcctttttgtagcaacgatgctttcagagacaacagagctttcgacaaagttctattcgaataacaatatgctggcactttatagcatgattgcattttcattatctgctgttatgtctgtgccgcaggttgtgaaaggtttagaaggagacgaaaaaggcattcgcagagcgattgcagccggcacgggcttgaatatgggactgattcttttgatcacatttatgacgcttctgggatgttctaatgtgacagagaatggagcactggtggatctttccggccatcttggcggatgggtcagcattatcggatatgtattttccttgctggctcttgcaacatctttctgggcgaatacactgaatcttcgagatattgtgaatgaacagacgaaatggggcgaaaagatcagctggcttgcagctacagtaccttgtcttgtgatcgcacttatgggagtgcagagctttgtaggatttacaagaatggcaagtgtggtccaggttctgaccggagtaggagtgattgttgcatacaatcgttccagaagacgtgcgggaactagcctgatttgcggaagacttggtagtttgccgttccagatattagcagtagcagcgtcgttggtagcatctgtaggagcagtgcttacggtgacagtgtgaaattacaaatatgttattacaaaagttgatgaagaaggagattagaaaatgcaaggacagattgaagtgaacagtagtattttagaaagatttgaattcagggatattagacaggaagaggcagatcaggcagtcttgattgagaaaatttgttttccgccaaatgaagcatgttctgagaaacacatgaaggagcgaatcggtgtgactccagaattgtttttagttgcggtagataaaacaactgggaagttagcaggatttttgaatggaattgcaacggacgaggaaaaattccgagatgaattttttacagatgcatctttgaataatccaaaaggaaagaaagttatgatccttggcttagatgtattaccggagtatcgaggacaaggtctggcacgagagattgtaagatgttatctgcaaagagaagaagaaaagggaagaaaagaaattgttcttacctgcctggatgaaaaagtagagatgtataaaagatttgggtttgtagatctgggaatgtcagattctgtctggggtggagaagaatggcatgaaatgacatattatctgagatagaagtaaataacgaatgatagtgaaagctgtaaagtctaatggaaaatatttgccaaagactttacagcttttttctaaaaatgtatgataagaaagggaaatgaaaaatgtgagatagataagacgaggagaaaatatcatggagtattgggatatttatgatgcagagaaacggccgaccggaagaacaatgaagcgaaatgactggtgcttaaaggatggagaataccatctgacagtgcttggagttgtggcaagaccggatggaacatatctgatcacgaaacgtgtaatgacaaaagcgtgggcaccgggttggtgggaagtatccggcggtgcagcgcaggcaggagagtcttctgaggaagcggtatgccgtgaagtgagagaagagacaggattagatatttctaatgcagaaggcggatatgtatttacttataagcgagaaaatccgggcgagggtgataattattttgttgatgtatatcgctttgtgcttgatattgatgagaatgatctgaaacttcagacagaagaaacagatggatatatgttcgcaactaaggaggagattgaaaactttgccaaggagggaatcttccttcattatgacagcattaagagagtgtttgaacagttacaataatttatagaatgaggaaaagttatgcattcagaaaagaagaaaaacagatttgaaattgatatgtgcaatggctcgatcatgaataagctgatttctttttcaattccgctgatgatatctggaattctgcagcttgcatttaacgcagtggatattgttgtggtaggaagattcagtggaagtgagtcactggcagcagtcggatcaaccacagcactgatcaatgtatttacgaacctatttataggaatatctcttggagcaaatgtgcttgcagccaggttctatgcggcagggcgcgagaaagagatgtcggagacggtgcacacagcgattacatttgcgattataagcggagttgtgatggcattagttggattgttcttttccagaggagcacttgagttgatgggaacaccggataatgtgatcaatctttcgacactatatatgaagatctatttcctgggaatgccgttttttatgttatataattacggagcggcaatcttaagagcggttggagatacgaaacgaccacttttgtttttgattgtagcaggtgtgattaacgcatgtttaaatcttttacttgtaattgcttttcatttaggagtagcgggcgttgcaattgcaacggtaacagcacagtttgtatcgtgtgtattggtattgcgttgcctgtataaatcagacagcagttatcagcttcgcttctcgaagctaatgataaaaaaagtatatttaggacagatctttcaggttggaattccggcaggaattcagagtactgtgatcaatttctcaaatgtacttctgcagtcatcggtcaattctttcggatccgtggcgatggcaggatatacggcagcgaataacatttttggatttttatatgcatcgatcaatgcagtgacacaggcatgtatgagttttacaagccagaattacggagtcggaaaatggaaacgaatggacagagtcttagttgactgcctgattctttccacaacgattgcattaattcttggtggaggtgcgtatctctttggaccggagcttttgaagatttatactgatgatcctcaggttatcagctgtggtatggagattcttctatatacaacagttacttattttctgtgcggatggatggatctgttcccgggatctcttcgtggaatgggaaaatcaattgtgccgatgatactttccgtaatcggaacagtcggaacgagaatcgtctggatctttggaatatttccaagattcagatcattgaagattttgtttatttcctatccggtatcctggatcattacgatcatcctgcaggtgatttgctttatttttgtcagaagaatcgtttatgcgccactgaaaaaacgagaggctgctatataatgaaaaaagaaatgctttatttcccaaaatataagagggaataaagcatttctttttttattacagcattttgtaaatgataattattgacaaatccaacatcctggaataagctagttttgtataactaattgataaaaaatcgcaataagctaaagaggatgataaaaaaatgacattaaaagaattagcgattggaaagagtgctgtgatcaggacagttggggcttccggtgcgttacgacagcattttttggatatgggtatgattccgggtgcggaagttacggtggtaaagtttgcaccgatgggagacccgatggaattgcaggtacatggatatgaactgacacttcgtcttgcagaggcagaacagattgaagttgaggaaatcagcgagagaacaaacagccattcccgtggagaacgtttgaaaccggtagatcatccgggacttggagaagaaggaaagtatcattctgaagaagatgctaatccattaccggatggaacagtgcttacttatgccctggtaggaaatcagaactgtggaaagacaacgttgtttaatcagctaacaggagcaaatcagcatgtaggaaacttcccaggagtaacagtagaccgtaaggatggaacaatcaaaggttatccaaatacgaatgtgacagaccttccgggaatttattcaatgtctccatacagcagtgaggagattgtttcaagaaattttgtgttgaatgaacatccgaaagcaatcatcaatattgtggatgcaacgaatattgagcgaaatctctatctgacaatgcaacttcttgaaatggatatcccgatggtagtagctttgaatatgatggatgaggtgattggaaatcatggatctatcgatgtgaatacaatggaagcactgcttggagttccggttattccgatttcggcagcgaagaacgaaggtgtggatgaagtaatacgtcatgcacttcatgtggcaaaataccaagagcgtccgctgcgtcaggatttctgtgataaaagtgatcatgacggtgcggtccacagatgtatccatgcagtgattcatctgattgaagaccatgcagaagaagcaaagcttccggtacgttttgccgcaacgaaggcaatcgagggggatccgctgatcttagaacagttaaagcttgatcagaatgagttggatatgcttgagcatattgtacagcagatggagacggaacgtgaggttgaccgaagtgcggcaatcgcagatatgcgattcgattttattgaacgtctctgtgagcagacggttgtaaaaccgaaagagagtaaagaacgtgtcagaagtgagaagatagacaaaatcttgacaggaaaatatacagcgatcccatgctttatcgggatcatggtgcttgtattttatttgacatttaatgtaatcggtgcatttctgcaaggaattctggaaatgggaattgatcagttgtcaagaatggctgagacaggactgatcgcactcaatgtaaatgatgcaatccgaagtcttgtgatcgacggaatctttacaggagtaggaagcgtgcttagttttcttccgattatcgttactttgttcttcttcctctctatgatggaagacagtggatatatcgcgcgtgtggcatttgtaatggataaactgcttcgtaagatcggtctttccggtcgaagcattgtgccgatgttgatcggattcggatgtacagttccggcagttatggcaacaagaacattgaccagtgaaagagaccgtaagatgacggtccttctgacaccgtttatgagctgtacagcaaaacttccgatttatgcattcttcgtaagtacatttttcccgggtaagggcggactgatcatgtcgggtctgtacgtgcttggaattgtagttggaattttaatcgcattcctttatcgaggaactctgtttaaaggagaaccggtaccatttgttatggaacttccgaattatcgtctgccgggtgcgaagaatgtggcacagcttctttgggagaaagcgaaagatttcttacagaaagcatttacagttattctgatggcaacgattgttgtatggttcttgcagagttttgacttgcatctgaaccttgtggagaattcagcagatagtattcttgctatgatagcaggtgcacttgttccaatccttcgtccgcttggactgggagactggagaatctgtacagcactgatcagtgggtttatggcgaaagaaagtgtagtatctacacttgaggtattgttcggaggtggaattgcatccgtactgactccattgtcagcaggtgttttgcttgtattcagtctgctttatacaccgtgtgttgcagcggtcgcatcagtaaagcgtgagcttggtgcaaaatgggctgtcggaatggtattctggcagtgtctgatcgcatgggttgtggcaatcatcacgagaggaatcggaatgctgcttttctaatggggaaagctgttactgtgacagtaacgaaatgtctcggaataaatcgtctggaaataaatgataaaatttattgacaaaacagaattcattcgttatagtaagaaacgatgtgtcagtgaggcagttgttcatgagacgaaccgagccgaaagataaattaaatatattccgtgagggagtagttcgcatgaaaatgtgatttgtcaacataccggtgagaatgagttttaaaagatcacctggcaaatcttaaagaatgagactcatgtatgttttaaataagaggacgagtttgttatgtcaagcaagcagttctcttatcatagaacatacgtgggtctctttgtttttatatattaggaaagtcctttcctaatatataaaaaacgctccgcttaggatgcgcactgcaattgtagcggaacagatacagaagaaaaaagaaaagaggagaaacatggcactatttatcgagcttttgttgatgggggtcgggcttgcgatggatgcattcgcagtgtctgtctgtaagggccttggaatgaagaagctgaataagaaacaggcggtagtgatcggattgtattttggagggttccaggcattaatgccgcttgtgggatggattcttggaattcagttccaaaagtatattacaagtattgatcactggatcgcatttattctgcttggctttatcggtgggaaaatgattctggaggcagtaaaagaatggaacgaagaagatattgttgaagtaaaagatcagccgttggatcatagaaatatgtttgtacttgccgttgcgacgagtatcgatgcgctggcagtcggaatcacatttgcatttctggacacaccgattcttgaggcaattacgatcatcggaattacgacaatgattatttctattgttggtgtagtgattggaaattattttggtgggaaatataaacataaggcagaactggttggtggaatcatcctggtgcttttaggtgttaggattttgatccagcatctgtctggattagcataaaatgaggttgaatatagtatagcagaaaggaaataaaagatgagtgatttgtttcaaagtgtgccatttgcagtggtacttttaattattggatttgtgtttcttgtaaaaggtgcagatgcatttgttgaggggtgtagcagtatcgcaagacggtatcatgttccgtcactgatcatcggaatgacgattgtggcgatggggacgagccttccggagactgcggtcagtgtgacagcagcagttacgggaaacaatgcacttgcagtcagtaatgcggtaggatctaatattttcaatcttatggttgtagtcggagcctgcacgctttttacttccgtggcagttcagattaatacgttaaagattgattttccgatatctattctgtgtgcggtattgcttctgattcttggtgcagccggaatgtcactgggacatatagatggagttgtatttattatcttattcctggcgtttatcctctacatgatccgctcagcacagacatctcgtgagaaaaatgtggagccgggagtggaagaggaagagtatcttctggaagcagaggagattcaggaaatgtctatgggaaagagtgtgatttacattcttctcggcgcagtagcgattgcggtcggaagtgactgggtagtagacggtgcctgtacagttgcggcggcaattggaatcagtcagactctgattggtcttactgtagttgcatttggaacaagccttccggagctggttacatcgattgtagcagcaaaaaaaggtgaggtggatatggcacttggaaatgtaatcggttccaatatctttaatattctcatggtgcttggtattgcggcagcaatttcaccggtcgcatttttgacagaaaatatcattgatattgcagtgctgatcgtgttcagtgttattggatggatcatggcatggacgaaaagagaacttaatagaaaagaaggtattatcatgttacttctttatgcagtgtatgttgtgtacatttgtatgagatagtttgtgataactctgaaaaaaggattatgtaaaaggcaaaaagtacttgtgccaatcacataatcctattttagtttcctataattaatgcaaagtagccccagtcccataagagggattcgaaactgttttccagatattcataaatatccgctgtttcatatccggtcattcgtgtaatgatcacaagatattgtctcaacgtttcgtaagaaatttcagaaacgtttgcgtctgtgccatccagcatccatcttaagaaaatgctgtggcggattgatgcatattcaagggcaatccattgcatctgtaccagtacattttccaggtcactgtcaggaagcaggagatcggagaaaatctcgttgcgcaggaaattgcgaagcagtggttcgtaagggctcaagtattgtgtgaattgttcccattgttccagtaaagtggattcgtaagctttagtatcatcaggatttccagtattgtccgaaagggcttccgatatttcttcagccaaagcaagaattggattcagagtgtcctgatagagcccttctttttgatagtttacggaaagatcttgtaacagttcgttacattcactgatcagatccaaaggtggaaggtctatatctgagatcgcatttccaagttctcttactgtgttgtcagaaaaataatcttctaacagttcttttgttaatggctgatgctggtacaattcctgaagaatatagaagctttccaaaagttcttcttcgattgttctggaagaatcatctaaaagattgagtagtttttcacgcaagaggaaaaggacagaagtatctgtatcgccagtatcggacaaagtgtctgatacatttggaaaatgcagggacttctgtttgttccacaggtcaatcactgcagggcagcaaggcatcagcattttctcgttatgtgtcggaaagcgatgctcctctcgtggaaatgtagtgcacgtttctgataggactttgtcgccgtaagcaacaacaaggcggcagagcttctcagagttaaggaatggacagcgatgatcactgtccaggcctatcacacgctgtccatcttttttaatcgtataagcgcttaaatttttcttttgttcaggtacggtttccggagcctggagtttcttccatttacggttcgtatctgcatcgacgccaatcttccattcctggcagcaggtgatcggacagcggtcggcgatgcaggtgaacttagaataataatcaggtatcaaataattaatttctgtcattacggtcatggaattctgtatgctgcccaacatatttgtatgccggacggatgatcttaccggcatttaacagttcttccagacgatgtgcactccacccggtgatacgtgcaatcgcgaagagtggtgtgaaaagctcttccggaatattcagcattgtataaacaaatccgctgtagaagtcaacgttagcacagacaggtttcagcatctttctgtgtgtcatgatctcttcaccggcgattctttctacgcggtcataaagtgcgaattcatcgtcaagtcccttttcagaagcaagcttctgtgcatagctcttcaaaatcttttctcttgggtcggagattgtgtagactgcgtgtcccattccatagatcagtcccgtcttatcaaaggcttttttatcaagaatcaggcggagatactcacgaatctcatcttcgttagtccagtctttgacagacttcttaatatcatcaaacatcccctgcgctttcaggtttgcaccaccatgacgaggtcctttcagagaaccgatggaagcagcaattgctgaatatgtatctgttcctgaagaagtaacaacatgtgtagtgaaagtggagttgttaccaccgccgtgttctgcatgaagaatcagtgcaacatcaagaaccttggcttctagttctgtatactgtccatccggacgaagcatgtacaaaatattttcggcaagagaacggcctttctccggattacggatcaaaagtgtctcatctttacggaaatgtctgtatgcatgataagaatatactgcgatcagtggaagctttgcaataagttcaagagcctgacgcagtgcattttcaacagaaatatcttcagggttctcatcatatgtatataaagtaagaacacagcgctggagtgcgttcatgatgttagagcttgaggccttcatgacaacgtcacgaacaaaacgtccgcttagatcttctaattcaaataaaactttcagaaaatgctctaattcatctttttttggaagacgtccgaaaaggagcaggaaagttgtctcctcaaatccaaaacgtttgcctttcagaccgttgataaggtcattgacattgattccctgatagtaaagtccaccttcagcaggaattttacgtccgtttataacatcaaatccacagacatcggatacttcagtcagtccggtaagaactcctcggccggttgaatcacgaagtccgcgctttacatcatattcttcataaagattcggatcaatgcggtgtcctttcaaaagtgttttctctaaatagtccatatcactgcgcagatcgtcagtgtttgcaattaatatatcatttgaattcatagttttcatcctcacaatacatatatgttttctagtgtcttgataatgcattttaatgtaattataaacagtcgagatggaatttgcaagaaatatatatgtattcttgcaaaaacatgaaaaaaatcaagaaaagtacgcataaaacagaataaaatgaatattgaattgttagataactcaaaaataagaatgcttaaataaattttctgaatcgtcagaaagaaaataatgtggctgtggtcataccagatgccaaaacgcgaatctattgtaaaaatacaaaaatacggagagatattttattataaagtgctgaaaaataggagaaacaggtgcatttattgacgcataataataagaagagtataatgttaaaaagataacaataggttggtataaccaattaaaagaaggagggggataattatgttattccaaatttatggcgatggtgccggctggcagctgttagggtgggtactggtgtttgccggacttgttcttgcaaatgaattcgcaagacgtacaaaaatcggtggtctgatctgttttggagctattccggctatacttacagtgtatttcatcgcaatctatatctgtgcagcaaatggtgcagaatgggcactgaataacgatacttatgtacatatgacaagctggttccattatgcaaaattgtatgctgcaacagcagggtgtattggttttatgatgctgaaatacaaatggggaattggtaagacagaatggttcaaagtattcccgtttgcaatcgttgcaatcaatattctgattgcagtagtaagtgattttgaatcaggtatccgtggattcatggcaatgaaagaattcggtgaccgctggtggctgtcttcagaaaatgtatggctctacggaggatggtggaactgggtgaacggaattgccggaatcctgaatatcttctgtatgacaggatggtggggaatctacacatccaagaagcatgacgatatgctttggccggatatgacatggtgctttatcattgcatatgatctgtggaacttcgagtacacatataacaacctgacaacacatgcattctactgtggtgttgcattgcttcttgctccgacatttgcaaatatgttctggaacaagggtggctggatccagaaccgcgcgaatacactggcactgtggtgtatgtttgctcaggtattcccattattccaggatgcaagccgtttctcagtaattccggctctgtattctgacggattcatggatgcagcagtaagaccgacaagtgctaatccaaccatgcagggtgtgatcgcggtaattgcacttgtagcgaatgtgatctgtctggctgcaattattaagagagcaaaacagcagaagaagaatccttataagaatgagatctttacagatcagaaggattataaggaagcaatggcgagagcagaagtttaaatttgtatttgtctgtctgattctccatattgaagcaaaggatttggtggtgaataaggccgcaagaatgatgctatattgcatcggacaccggcccgctctacctcatccccttgaaagtatgtaacgtaagagccagaacagttaccgtgagtggtgcctgtctggctcttactaacatactgaacaaggtggattcggaacgctcctgccttacatgtgtcctcaacaatatagcaccatccttgcttcgttattccaaacagatttgtttgctcaacgggacgaatctgaaagacttcatacaagttttgatttgatgcacgtaaacgagaagatagactcagattcagtccacatcacgcccttatccaacaaaagtttttgcttcattactcagaattcaaacgtctaaatacaaatttacaattcatagtaaatctgatgttccccatcaatgcagtcctgcatggattgctgaacccatgcaatcgctccttgggtatcccggtctcggatataggtccaggtcttataattgcttcgatataattcttctatcccatagagttcacaataacgttcccacatattaaaaatcggtgctcggaaagattggaaaataagtggaatcaatgtatttccggaaattagggcaaactcgtgttggaattcgtaagcagcttcaatggcagtggtgacatcctgtgcatcacggatctgattaacgaattcgaggagacgctggatgtttttgtcgctgatcgtgtcgatggcgagctgtgcagcaagtgtatcaagcgcaatgcggacttcgaagatggaacgaatctcctgatcacgcatgcgtccgccgttgtaattcatgatcgcaatcaatgtatccagagtcccttttctgcggaaatctgctacataagttccactgcggggttttacggtgaggaatcctttcttctccagctcactgatcccgctgttgacaaccgcacggctgacctgcatcatttcggcaagctggcgttccggcggaagtttctctccaacctgtagcttgccggaaagaatcagatgttctaattgttcaataaacagatccctcagggaaggggaactgatcttctgaaattccataataaattctccgtttcgtaagcgttatcttcacaaagtgtgttttgatgagataaaaatgttgaaaatctcgtaaaaaataacgtttattgttgataagtttattatagggaaaacaggcggtggattcaatactctatatttatatcagctgggagatgactcccatctctataggtggtgagaaacaagctagtatcagtggtgggagtcatctcccagctgatatagcctccggcaggattgcagaggcattcttgaacaaatgagggagtcaatccaccatctgatatagtctctggcaagaccacagagatgcgcagaagaatgccgaggaattcttgaaatgcaaggagattgtggtattatagttagagtaaattgtgcgagtatatcagatatgagaggaacaatcatggtaaagatagatttaattacaggttttctgggggcaggaaagacaacatttataaaagagtatgcatcctacctgcttcgtcagggtctgaatatcggaattctggaaaatgatttcggtgcggtgaatgtggatatgatgcttcttcaggagctgcagggagaaaaatgtgaactggaaatgatttccggagggtgtgataaagagacacaccgcagacgattcaagacaaagctgatctctatggcaatgtgtggatatgacagagtaatcgtggagccgtcaggaatctatgacgtggatgaattttttgatggattaagagaagaacctctggatcggtggtacgaaatcggaagtgtgatcacaatcgtagatgcgggactggaagaaaatctgtcagatcaggcggaatatttgctgggatctgaggcagcggatgcgggtgtgatcgtgctgagcaggctggataaggacaatgcttgtgaagaacaggaaaacagaattatttcacatgtcaatcgttctcttgaacgcattggatgtaccagaagaattgaaaaagaagtgatcgcaaaagactgggatatgctgacagaggaagattttgcacagattcagaacagcagctatcagattgagtcgtttcgcagaccggaaggtacagaaaaggatggattccagaccttatattttatgaatctgaatcggacagaagaagaaatggttccggctgtgaaaaagctgtttggtaaacgtggatgcacagatgattctgaaaaagaaaacaataaaaatcttaatgatatcggaagagtgttccgtgtaaaaggatttatgaagaatcaatccggtgactggatggagctgaatgcgacaacacagaagatgacagtaaatccaatcaaagaaggacaggagattctgatcgtgatcggtgaggatttgaaagaagacaagattcgtgagtgcctggaagacaaatgcactgagggagcggaaaatgagtgaaattcaattgccggaagcatttctgaaactaggagaagtgctggaacaaggacagtttgaactgctttttacagaagaaaaactgcggctggtttatttgatgaacgatgcggtagagagctttcttgtctttgaaaatgcaaggatgacaggtcagtatagagaggattatgaaggtgaactagaagcggagttaagtgtaacagaagaaccggaggagtcctatgtccttgtagttcatcagggtgagaccgtggttacgattttttttgaggatttaagtgaagaagtacacttatatgactatggagaaatcggacatttctgggtgaaaggtgcggaatatctgcgtcagatagaatataagattgcaatcgtacgggataaactggattatctgggagcaaaatactgtaatcagacggagcggaaactagctgcgctggcggactttccgccgctgaatcattgctgttatccggcagtttcagagcaatatgtagttccaagggaaaatccgtgggtaccgtcagcagaagcacatcaagtgatgcaggagcttgcggcaacagtagaagataaaaagttactaagatgtctaaagttttatcagaaacatccatggaagcggagtgcaaaaaagattgccgggatgctgcaggaaaagcgtcatgcagaagtcacagatcttttgatggaagaactgaagatggcagcagcaaattacccgagaagaaaattcacagatgaggaagaaaatcagaatcgtaagactgagaagagagcatcagagcggaaacgagagttagaagaacagggatttcggataaatctatttcgtgaggaaccatttattgcatcaagagattcactccaatacaaaatcagtctgatgatctgggaaaagaaaggaaaaaaacgaaaagttcagatagaagaattttctgctgaccggagaggataagtatggaaccattttattatagtaagatgaataagatgcagcaagcaacgtatcatgcaatctgtcagggcgtcttgcggatggagaaggagattcaggtaccgcgtatgagcggagaagaactgtataatgtattcttccggatgcgcctggatcatccggagattttctgggcaacgggatttaagtatcgttattatcaggaatcgccgaacattcagtttctgccggaatatttgtttgaccgggcgaaggtgaaagaacatcagaaggcaatgaaatccagagtagagaaacttgcacgaccggcgcagaaattatcagaatcagagaaagaaaaatacattcatgatttcatttgcgagaatgtaaaatatgataaattgaagaaaccttattcacatgagattattggtccgttaggacagggtgtcggagtatgtgaggggattgcaaaagcggtgaaagtgctgtgcgatgagcttggagtctggtgtatgatcgctatttgcgggaataatccggataagggaatcaaataccgtcatacatggaatatcgtgcagattaatgagaaatattatcatttagatgcgacatttgataatacacttacaagaaactgtacgatcggagaagaaatccgttatgattatttcaatctggaagataaatcgattttccgggatcatgagcctttgatcgctccggctatgaagtgtacggacggagatcatttctattataaagaaaagaaactgtcttttacaaaaacggaagaagtttataaaagagcacttcagatggcaaagaaaggaagaattctgacgtttcactggcgcggaggttatctgacaaaaacagttctggaagaattgcttgatctgattggaaaagcaggtgcggagaaagggaagaaaccaagaatcagccttaactggccacaggcagtaattcgttttggttatgttgatgcagagatagcaggaagtagcgcagcagaagaagtacaaatggaagaagcgaatgaaggtgagatgcattctgactaaaatacatatgttatatatgcttcagaccgagatgggtatcgagtgacagttgagaatttacaagaaaaagttagtgtgatagaataggattgaaccgtgaaagttgtcgatatctgtaggatataagcgggagaagaaacaactttcaaaaaccaaagatggtgacaaaagagaggttaaacagatgataattgtaaaaacatacagaggacatattcgtaactgggaagaactttgtgagagacttggaattgatcttacactttccagagaagaaagagaacatgagattttgatcaaggcatatcagacatggggatgtgagatggcagatcatatgcacggaatgtttgcatttgctctgtgggatgaggaagagcagaagcttttctgtctgagagatcagtttggaacaaaaccattctattactatgagacagaagatggagagcttctttatggaacgatgatccgtgatattatcgatcagccgggatttaagaaagaactgaatgaagagatgcttcagctgtatttaagtctgacctatgttgccggagaaaatacatttttccgtggactgaaaaaactgttaccgggacgctatctgatctggcaggatggaaagcttgagattcacagatactggaaaccggaattccatccggatgagagcaagactctggaagattgggctgatgagatccataatactctgaaagaaatcatgccggaagtgaagaccgcagatgagagagtggagtcattcctgtcaggtggtgtagattcttcctatgtgcttgcaatgtctgatgcagaacaggcagactgttgtggatatgaggaagagagatttgatgaatctgttcttgcagagaagacagcacagcttcttggaagaaaattttccagaagtatcattacaccggagcagttctttgatattgtaccttatgttatgtacaatatggagcaaccacttggagatgcatctgcgattgtatttacacttggatgtaatgcaacagcagaacatacgaagatctgttattccggagagggttctgacgaattcttcggtggttataatatgtacagaaacgccgaacgttatggtgagaatctgaagaatttctatgttggaaataccaatatcatgaaagaagacgagaagcagaagattcttaagaaatacgatccagacgtactgccgattgaacttgcacgaggaatctacgaggagacagaaggtcttgatccgttgacaaagatgtctgatgtagatattcagatctggctggaaggtgatatttacctgaatgttgataagatgagtacagcagccggacttgagatccgtatgccgttgacagatagaagaatttttgatatcgcatctcgtatgccgtctcgctttaaagtaaatgaagagcagaataaggtggcattccgtacggcagctgcgaaagttcttccggaagaaattgcattccgtaagaagttaggattcatcgtaccaattcgtatctggatggctgatgagagatacaatcaagacgtacagcgtctcttccacagtgatattgcagagaaattctttgatgtggatgcaatcaatgcgatttttgatgaatatgttggaggaaattctgataactggagaaaagtatggacaatctatacgttccttgtatggtatgaagagtactttgtgaagagataataaaaagactatgtattaagactttaaacatttttaagtgatggggtggaagcataaaaagctttgcccctttttgttatccctttgattatccgggatatccacgaaaaagagacaaaagaaaatccaccgtatgcacctacgctatacagtggatcttcactttgttattccatccattggaatattcctccttatttacttgatatctatctgaaactattatctcaaatagtgattttatattttatttcatttaattatcccattggaatatccttctttcgattcttcttttatctattttggattttaacttatcgtcccattggaatttacctctttcaatttatttgtttgatgatttaatgaactatcccattggattctacctctctctctttaaatatcgtttccgttttttaaattactctttctggtggtctgtacctctttctttagatttttaaggatttaatttaccttcccattggactatacctctgtttctttaaaattaattttaatgaaaggattaagtgtctggtggtttgtcctcctttttgttttttatttcgtttccttttgttgattctatattaactcacagataggcatttgtcaatagaaaatcagaaaaaagttaaaaataatttaaatatacagaaaataagaaataaaacacaaaaaatacaggctattaattgcgtttaaggtaattgtattagacagaaaagtggacgcaatctatggaaacatggtatgatactaagaaaagagttgccagctgcacatagaacgaacagcaacagaatgcaatgctacaggcccttgcaacgggcgggaaatggagagagaaaattgagtaaagagtcaagaaccagctgtgaaacatgcacttattatatttatgacgaggagtatgagtgttatctctgtgataagaatatggatgaggatgattacatccgtctgatgacaaatcagcactatcaatgtccttattatcggaatggagatgattatcttgttgttagaaaacagctgtagaatcatagaaaaagcaaggaagtataaaaccaaaagaaagaataagaagaaaagcgggagaatcgttagatcagattctcccgctttttaagaaagacctttgtgcaagcaccggtggtttcagatcttttgaccctggtatcattaaatagttttcaatacttttaagagccggttattgtcttcaggtttcataatgcagaagcggatgaattcgccatccagacattggaaagaagagcagtcgcggatcataagtccttcttttatacaagcttcgaatacatcgaaagaagttacttctggttttaaaatcttcacaaggataaagtttccatatggaaaataaaccttgaaagaagacatcttttttaattcaagaaacatccggtcacgttccgtcaggattaatgcacgtgtctggcggatgtaggaagtgtctttgaacatctgctcaccggcatatgctccaaggctgtttaaggaccatggaatctgcttttctttcatctgagataagaactctttatttccggtaatgccgtatccaaaacgcatccccggagctgcgtagaacttggacacaccgcgcagtaccatgagattagagaattctttcgtgtatggaatagcggttacttcctgaacggaaggtgcaaattctacataagtttcatcaatcatgacaaagatatcgcggtttgcacagaaggaaagcaatgcacgcatttcatcttttaagatggcagaagaagttggattgttcggattgcagagaatcagaaaatcatatccgtttaacaaagtccggcaaagatcttctacatctaattcaaaatcttccgcttcctgaagatgataatagtcctgtgtacttccggagaaagaaagttctctggagtattcagaataggttggaccaagaatcagagtgcgtttcggtgctcttgtttcaatcaaaagtgaaatcagttcgcttgaaccgttgcccggcaggatgaaatcagcaggaacatcgcagtactcagcgattgtgttgcgaagcgatttataatcccggtcaggataagaagaaaagaggtccacatgagccgcaacagcttccttaacagaaggggaaagtccgagtggatttacatttccggcaaagtttgtaatactgttttggtcgatatgataatattcactgattttttcaatatcacttccatgaaaaacaggttttgtattcgtcataggcgtctcctccttagcaggtttcaaataaaattccaagcgtatttggtccacaatggctggaaatcgtacagcttgcttttgttatatggatctcatcaaaatgcatagcttcttcgattgtatttttaacaagttcaatatattccggatcaatgccggaatgtgtgataaaaatcagcgatggatcgatatccggataagcagcaagtttgtcttttacatatttcacaagaactttatcaagcgttccacgatatttctttcctacattcatactgccatctgctgtgctgacttcgatacacggctttaatttcaaaacatttgctccgagagcagcgaccgtcgaacagcgcccaccggcatgtagaaatgtcagcgtatccaaaataaagctggcatgacaatgctttgtgcgttcgcgaagagcttcggcaatgtcttccgctttcaatccctgctcgatcatccgaccggcatcggttacgagaagtccggttccggtggagagagaacaactgtcaatcacatgaacatgcccgagctcttcagcagcaatacagcagttttgatgagcactggaaagtgagctgccaagattgatatggatcacttcatagccttcatcgacccatggtttaaaatgttcaatatattccgcaacattgacggcagctgtttttggaaggattttttcatcgtaatatttctgataaatttcttccggtgtaatgtcaatgccgtccttataatcttttccatccagaatgatgtggagtggaaaataatgtacatgataacgttcttttagttcctgatccaggtcacaggtactgtcggcacttaaaatgatcttatttgtaacagaatcagtcataattctcctcctaaattagttcgaaaacttgaatcgtatggctagtatgtatttatactgcataatgtgtacacaaattataacatatttttcccatagagtatagtttttgtatccaaaaaacaatacaaaataagacttttttgctattgttcgctcacaattactgtttgttcgcttttactatattaaaaatgcaaagaatcttggaagcttttattgacatatatagataatcgatatataatcaagacaagatatatagataaccgatatgtcagctaggagtcaatccacaagttgatatagcctccggcaggattgcagaggtgcgcttcattttgcaatgagaatgttaagacgtgtacggttaacgtaaaatcagaagattaggaggaattgttatggcagttgacagaagtctggtatcaggaagcacaacgatgttgttattaaagcttttatctgaaaaggatatgtatggttacgagatgatcgagaccttaagagaaaagtcccagaatgtgtttgaattaaaggcgggaacgttatatcctttgcttcatggaatggaagataagaaatatctgacagtttatgagaaagaggtcggtggtaaggttcgtaagtattacagtattacgaaaaccgggaggaaagttttagaagagaagaaagaagagtggaaaatttattcatcggctgtagtgaatgtgctgaatgcagcagtttgttagaaagggtgatgtttgatgagacgagaggagtatttgtatacattaacagaacagattcgctgtaagatggcaagagggacgatagaacaggagatcaatgatcatattgaggatcagaaagcggaattcctaagtgaaggaatgagtcagacagaagcagaagaagctgcgattcgagaaatgggtgatccggtagaagtcgggcttgagatggatagaatccaccggccgacaatggcgtggggaatgatcgcactaattgttggattaagtcttgcaggctatcttttacgaagtgttatgtatcagaccgttttaggtattgagcagagtgcgggaaaaacagaagacttgttctgggtaggaacgtcattgagctggcatacatcgctggaactgccggcacttttgcttggacttgtgctgatgattggtatttgctatatggattatacgaggattgcggtttatgcaaaaccaatcttgatcgcatatcaggtgttacttttcattggactgcaggttgccggtttgaaactgaatggatcaacaagatatatcagaatcggaaatattggattgaatctgattgacttactctggctgacaattccgttgtttgcagcggtattatatagttacagaggtcagggataccgaggaattttaaaagcaatcctctggatgatcattccatcttattttctgttcataagaagccagagcctgatcgcggcaatgatactggaattggtttattgtgtggttctggcggtggctgtttacaaaggctggtttcaggtttgtaaaaaagcagtacttacgggaatcggagcagtagtcgttctgataccggttctgcttgcgggaggcctttggtgttttggcaaggcttaccagaaagagcgtatagcggctatattatcaatcggtgatcatgctgcagatttcccgagagtcaatgtgatctgggaaatgatttccggaagttcagcatttcatggcaatccgcagtttaaagaacttctgacatctgtagacggaagtgtccatctgcttgccagtgtggtagctgcttatggaatactggcaggtattctactggttctttgtctggtggttctgatctttcggtttgctaagatttcattaaatcagaagaaccagcttggtatggtgatgggaacaggatgtacagcattgtttctgattcagacagtagtttttatattagaaaatctgggaggagtcggtaatatgggaatctactgtccattctttggaacaggaagagcaggtatgctgacatcttatatcttgctaggattactgctcagtatctgcagatatcagaaaacagcgccggaaccggcaatcaggtcctggcgctggaggcaacgttctcaatcatgaaaaataaattattttgttgtattacgacgaattaatacaggggcaatttgtttatgaacaggttcacctaatggtttgggaacacgctttttctgctcttccatctgttggacaagaagatccatagcagtctttgcaatcacatcaatctgctggccgatggttgtgatcggaaggattgcctcgctggcaatcggagagttgtcaaatccaacaatctcataagtagaaggaaatgttccatatttttggaaaattaaattaagaaacatatttgcataggtatcattcgcgagaaagataccttttttttgattggggtattttgcttctattttattgaaaatctctcggattacgtttaaaatctcatgataagaatcaccttctacactaagatctatatcatatggaacatgatattcttcgcaagtagcctgaaaggctcggattcggtcataagccgggatggatttattcacattgacatttatatgaattaatatgtcacatttatcccgaatcaacagggaagtagcttgaagtgcacccatatagttatcagtattgacactgctgatatattctgcttcgcgttcaactgcgatgacaggaatctgataggaagcaagtttctcagatggaagagtgtgacttaaaacaatcagtccttcaatctgataagacagaagttcttcaatgtactgttgttcttcttcagcaccatgttcactggcgaaaacaagaaatttatagtgataatcactgtaactggaaaggaattgtgtcagcatctcagaataatagtgcagataaaggtttggaacaatgattccgataaattcactttttccatttgccagaacctttgccagcttattctttttatatccaagtgtatcaagagcctgtgaaatcttttcctggttttcaaccgtcagtgaatccgggtgattgaaatatcttgatattgtagtttttgaaaaattggtatattccgcaatatctgcaaaagttacctgttttttactcataaaagttgaatctccttcaatatgatggctgatggttcataatatcttttagtatagcaattttcatggaaaaacgcaacacttaaataaccagttacgtaaccggttattttatcgcacaaaagtgttgacagaaatagaagaatatagtaatatcaaactataaagtaaccggttacgtaaccggttttccatagagttaaaggaatggaggaagaagtgcatgaaaagaatgcaaaatcaagcaaagtccgtgagcaaacgaacgtggagagaaaagatgacttatatgaagaaaaactggcagttatatcttttcttcctaatgccagggcttttactgacaattatttttaagtatctcccaatgggtggtctcctgatagcttttgaagactacaatgtaataaaaggagttcttggtagtccctgggtaggacttgagtattttaggcgatttttatcttcaccggattttatgaattatctgatgaatacattaaaattgagtatctatggactgttgtggggattcccggttccgattattcttgcattgcttctaaatcgcatccgtaagacagggattaaaaagaaagttcagcttttgatctatatgccgaattttatttcagtcatcgtactttgtggtatggttcgtatgcttttatcacctgtaggaccgctgaacaaagtgctcggaattagcacaaacctattgttattacagcgtagcttttgtcttagttcatagagtgccgtaaagtgcttatttacaggctttttacgggttttatgaatttatcacatttcatcaaaaatcgtcaatatacaaaaatttggtgtcaaaattggtgtcaaataaccttgatttgagattttgatgagtaacacatcagtaaaaaaattgaatattttatagactatggaacgcctaaaatgacgttccttttctatttccagccgttcttattggacggctattttattaccaaaaatgaaaggagcattagatttatgaaaaagacatggaaacgattgtgtatgggcttcttagctcttgcaactgtcgttactgctttaccgactacacccgttcatgcagaaagcaagcaatactggacggaaagtgcggagcgtgtcggtatcattgaaaaagtaatgaatgacggttctatcggttcgacattcaatgagggctatatgaaagtcgagggcgaaactgcctattgtattgacatcaatacagattttaagaacggctacaagaccagagctgacgcaagctcacgcatgagtgccgaccagatttcagatgtggcgttatccttagggtatgtcaaacagtatggcgaaactcacaaggaattgaactacaagcaagtctatctgttggaacaatgtgtggtctggcagagattaagcgtacatcttggctggcaatgtgataacgtgcgagcttcttatgatgaaataccaaaggctacgcaggacgaagttttcgctggtgcaagagcctttgtcaaagaaaataaaggacgctatgaatgtggcggttatatctactctggcgaggggcaggaattagggcaattctgggcgaaactgaatgtcggaaatgcgaaactgcaaaagacttccagtaataccagcattacagacggtaacgggaattactctattgcaggtgcaacctatggtgtcttttctgataaggactgcacgaaacagcttgccacccttacgactgatgaaaacggaaatacagatgttgcagaggtaacggctggcacagtctatatcaaggaattatccgcaccagcaggatataaagtggataaaactgtatattccttaaaggttgaagctggaaagacagcaaccttgaaagtatcagatacaggactgataaaacgggaaaccagcaaggcacttcacgctgttatcaactttgtggtggtgttcgtgctgtccgcttcttttattgcctacgctcccgactatatcaagaagataaatgaattttcatcagacatcagtaccgcttctttggacttgggaacaaaaatcatgctccccaactctgacagcgagggcaaggacagcgtggacttgatacgggacagcctattttctattcaagtggaacagccgtggctacttctgcaattcggtaacagcaacacagaagaaatcggggcagaccgtgtcgaagctcttgtatcggcaagtccagaggacgaggacgggaaaaccagagaggaagtcgtgaaaacagaaatcgaggacaacgacaacaacaatctgacaataccgcaggtagtgaaccgtttaggtatggtgttcttcctactgttcttcaatttagggataacgatatttgtattcttgcttacgggcatgatgttgtttagccagatactttttattatctttgcaatgtttttacctatcagttttctactttccatgataccgagttatgaaagcatggcaaagcaggcaatcgtgagggtgtttaataccataatgacacgggcaggaataacgctcattgtaacagtagcgttcagcatttccagtatgttttataacatctccacggactatccgttttttatggtggcgttcttgcagatagtgtgtttcgctggtatctacatgaagctgggcgacttaatgagtatgttctcacttaatgctggcgacagtcaaagcatgggacacaggattttccgcagaccgtatctgtttatgcgacatcgggctaggcgtatggaacaccgtattgcaagggcggtaagtgctggcggtatttcgggcggtgtcgctggtgcggttgctggaagtgccgttgctggcaaacgggctgaaagaaaaaataccgcttctaaagaaaatcggggcaataccacttccagcgtgggacagcgtgcaggctcaaaggtgggtgctgtcttagatacgaaaaataaagtgaaagacaaggcaaatgctgtcaaagagaatatcaaggatatgccgacacagaccgcttatgcggtgtattccacaaaggaaaaggcaaagtccagcgtgtccgacttcaagcgtggcatggtgcaggaacagcagtccagacagtcgggacgattggaaaggcaggcacagcatagacagagtatcgctgacaagcgtattgagcttcaaaaggcacaagaagcaaggcaggcacagcgaaagacggacggatcagcgacaacgggagctacccgtccccatgagcgaccagccacagcttcaaccattccaaagccgagtgcggaaaaaatgcaggaagtgaaacgccctgccacagcgaccacttcaaaagcaagtgcgccagtcaagacgaatgttgtaaaagagcgtccgttatcttctggtgcttctgatagaaaagcgacccagcctgcacagccagtacataggcagaatgtagaaaaagtggtatcgcaggaaacacaccagaatgacaccaaagaccgcaggataaaggttcagcaaacgcaaaccgtccagaagaaccaacagaccatagagaaaactcgtaaccttgtaacgaagaaaggacagaagaaaaaatgaaactgaaacatatcgctcttatcggcagtctgtttcctatcctcttttctctggtgcttttctttggggtgctgattagtgcggacagcgacgatgagaacagcaacttttcttctggcattacgggtatgaacttatccgcagaagtcttgaaacatcagcctatggtggaaaagtacgccagagaaagcggtatctccgagtatgtcaatgtgctacttgctatcattcaagtagaaagtggcggtacggcagaagatgttatgcagagttcggaaagtctgggtttaccgcccaactctttagatacggaaagctcaatcaagcaggggtgtaagtattttgcgtccctgctttcttcctgcaaaaatcaaggtatcgacgacttgaatgtagcaatacagtcttataactatggcggtggctatgtgggttatgtagctggaaaaggaaagaaacacacttttaatcttgcagagagcttcgcccgtgaaaagtcgggtggaaagaaagtaacctatactaacccgatagccgttgcgaagaacgggggctggcgatatggttacggaaatatgttctacgtagaattactcaatcaatatctgaccgtggcacattttgataatgcgacggcacaagcgattatgaatgaagcgttgaaatatcaaggctggaagtatgtatatggtggcagtaacccgaacacttcctttgattgtagcggacttgtgcaatggtgctatggaaaagctggtatctctttaccgagaacggcacaagcacagtatgacgctacccaacatctcccactctcgcaggcaaaggctggggacttggtgtttttccattctacctataacgctggttcgtatgtaacccacgtcggcatttatgtaggaaataaccagatgtaccatgcaggcgacccgataggatatgcagacctaagtagtagttactggcaacagcacttaatcggtgcaggacgagtaaaacaatagaaaggacttgaaaaatatgtttaagaagaataagaaacagacagaaactatcaaagaaccaaaagaaaaaaaggtgcgtactgtcaaggtaggcacacataagaaaaccgtgattgcgttgtgggtggtgcttgtcgcaagcgtgagctttggggtgtataagaattttacggctatcgaccagcacaccacccatgaaaaagaaatcattgaacttcgcttgcaggacaccaacgggatagaaaatttcgtgaagaattttgcgaagtcctattacacatggaataacagcaaagaagcgattgaagcaaggacgcaggcaatcaacggttatctgacaaaggaattgcagggcttgaatgtggataccattagaaccgatataccaaccagctccacggttacagatgtgattgtatggagtatcgaacagtcgggaacggacactttttctgctacctacgaagtagatcagcagataaaagagggagaacagacaagcaatgtgaaagcaacctatactgtaaaagtctatgtggacgcagacggggatatggtaatcgttcaaaaccctacccttgcaccagcagttgaaaaatcagactatgagcctaagacaccagaagcagacgcaagcgtggacgctgatacggtaaatgacgctaccgcttttctggaaacattctttaagctgtacccaacagcgacggaaaaagagcttgcttactatgtattgggaaatgtgattgaacctatcggcagggactacctttattctgaactggtaaaccctatctttataaaggacggcgacaatgtgaaagtcaaggttgcggtaaaattcattgataatcagacaaaagcgacgcaggtatcgcagtatgagcttgtgctacataaggatagtaactggaagattgtaggataaatgatatagcgtgcatttcctatcagatttgcacgcttttacaaaacgacaagaaaactgtgcaaaaatattgacttgtaatgaccgaatgctataatataaatgacaagtgtacttggtattatttgaaaggagcgttatataatggataaagaaaaaatactatcacaaaacaaaaaagagaatctatatcttgatgaatacgaaaaacatattaaacttcaagggaaatcttttggcttaatgtttgttttatttatctgcattttaattcttttcattaaagcagtttgtaaagaaccttactatgacataatgacaattattgggtctgtggcatttggctctatgggttatgaagcacatatttcaaaaaataaatccaaatttgttattgctttattctttcttctatttatggggtattacttttataaatttttaatgataggtttatagaatggacgaacatttaattttgcgaaacagattaaaaactgtacgaaaagaaaaaaaattatcacaaacagaattagctgaactagtcggggtttctcggaatacaattagttctattgaaactggacaattcaatccaacagcaaaattggcattagtgctttgtatagctttagataaaaaatttgaagaattattttattttgattaaaggagagaacgattatggaattagaggaattgattgttgaaatagttataggattgtttttactttttatatcttatcaaataggaataaaagagaatattactttattacatggttatcattatacacaacttgaccctaaagataaaaaggtgtttacaaaaaaaataggaataggcactttactggttagtattggtattcttgttatgccgattatcaatttaatctctcattctgaattaggctattacataggtcttattttgatttttgtaggagtgttttatatcatattcatcattgtaaaatacaacggaaaacttattagctttaaaaagtagaattgaggtatgaatatgataggactgaacaaaagagatataaaaaaggcattgaaagctggtgcaaaagctggcggtgtatcattggctgatgttcgggcggatattgaagctacgattgatgaagctatgaatagcaccgacccagaggtgcaggcaaatttcaaaaagtattttgggaataaacgccctacaccagaagaatatatttatatcattacgaaaaagacaaaggcaaaattataataaaagggtcgtggaaatgcttcacaaaattgtgatctgcattatcacggctcttttactctctgtttactttcaaaactgtaagtgtaattgaatactgcccttgctataatttaattgtattccaaaacaaataaatgtggcaggaagaaaggagcgatttttaatggaacacattttaaatttagagcaagtaaaaaaatactacgggggtaactctggaaatatcacaaaggcagtagacggtatttctatgtatgtagataagggcgaatttgtcgcaatcatgggagctagtggttctggaaagactaccctattaaactgtatctctacgattgatactgtaaccagcggacacattacagtcaataatcaagatattaccaaaatcaaggataaagattttgctgatttcagacgtgaaaatttagggttcatttttcaagatttcaaccttttagatactttaacgattggagaaaacatttctttatcattggttatcaacaaacagaaccctactgatattgagaaaagagttcatgctatcgccgataaattgggtattcgtgatattttatcgaaatttccttatgaagtttctggcggacaaaaacagcgttgtgcttgtgctagagccttaatcaatgaaccgaaactgattttagctgatgaaccgacgggagctttggactcaaaagcttccagattattactggaaacaatgtctgaaatcaacaagaaaatgcaggctactattttaatggtaacacatgacccgtttagtgcgtctttctgtgaacgtattttgttcttgaaagacggtaaaatattcaatgaaattttcagaggggaaaaaagcagaaaagatttcttcaatgaaatactggatatattaaccttgctcggaggtgaagtgggaaatgttaggtaagttagcgtatagaaatacaaaaagaaatattaaagattatttgatttatctgataaccgttactgcatccttttctcttatatttgcttttaatttggtggcaaattctgatgaaattgtaaagttatgttccagtatggatgcatttaagaattcattgttcgctgtaaatattcttattatttttgtgatatgctttttgatcaactatacaacgaaatttatgtttgaaaaaagaagtaaagaattaggaacatatatgcttcttggcattaagaaaaaagaaattgcccacttagttgtaattgaaaatatactgttgggaattttagcaattgtattagctattcctattggctttttattcagccagtttgtgtcgttagtaattgtaaacttactgggtattccaaaaactctctttatttctttgaattttgtttctattggactattgataatttattttttaactatttatgttttggttttacttaatctattaagaagaataagtaaaatgacgatacgtgattttctttactttgataaacaaaatgaaaagaaaatgttccgtgacagtaaaaaaagaaatgtcatttttgttttaagtattattcttggtgcgatttctctttttctctggaattcacgttgtactatggataattttaataagcaagaaacacttacctgtttgatggtaagcgtaatcatgttgattatcagcatttatggtatatctacaacttgtgcagatatgttcttgactgttttgttaaagaataaaaaaatgaaatatcaaaatgacaatctgtttgtagcaagaacatttgcttctaaagcaagaacaatgagcttcacatttggtacattgtctatgttgattttaacttcactgctggctctgaattattctagtatcaacaaagcttcgtatgatatcagcgtgaatttaaatgcaccatatgatatacaactctttgatgataagcaggtatttgatgaatatattcgagtaattgaagaagaatatacgattgataataccattgagtacgacatttataaagagccgaatcatcaggtacaaaaattcttccaatcagaatattatgattttgacccagtcttgaagttaagtgattataataggttactagaattaagaaagatgccgttgctttctttaaatgataacgaatactatatagttacaaatagcaagtttgcatatgaggttgaagataacaaagacattgaaaccataacagtagcaaataaaaatttgaaattaaaaggatatgacactaagtcttattggaactctataactaatactggcagatttgttgttgtacttccagataaatatgttcaaggacttgaagtatcagaaaatcatttgattatagatacaaaagaagatacagacgcagaattagaaaataagataaaagaagatatgcaacatcaattagtaaaggttgatgaaaatggagaaataaatgatgagtcgtatagagtaaacgtaagaggtgcagaaatagaacaacaaaaagcaatggttgcaatagtagtcagtctgtttatgtacattgcatttattttgatttccgcagtaggaacaattttggcagttcaatcattgagcgactctactaaatacaaatatcgctacctgaccttgcgaagattaggaataaatgataagtcgctatttaagacaatcagaaaacaattattgatattattttgtgtccctgcaatatcagcaatattgtgttcttttgtgatgatgtcgtcattgaataatgtgtatcaacaaattttgggagataaacacctttatctaatgtactttggcttgaatttaattatcttcttcctaatttatagtatttactggatagcgacgtatatcggtttcaaacgaaatatcaatgaggagagttagatttttctagctctcctgctgtggaattattataatggtaaatcaagggggtgttgaaatgagaatagcgattatcgaagatgatgaaatcactcgtttggagctttctaaactattgaacacacaaggatatgaaacagttttattgactgactttggaaatctgacagaggaattaaagcaatattccatagaactggttctgcttgatattaacctgccgtatgagaatggctacgaagtatgcaggaaaataaaacaagtcatgccagtaccgattatctttgtaacaagcagagatacaaatgctgacgaattgaaaagtattcaagtgggcggaattgacttcatcacaaagccgtatgacacgcttattcttcttgagaagatcaagcgtgcattgcagttgtcaaacccgagtaatttccgtgagcttgtcaaaaaagattgtacccttgatttacatttatccattttgaagtatcaagagcaaagcattgaactgacaagaaatgaatttcgtattttgtactacttctttatgaacgaagataaagttattagcaaagaagaactattggaaaagctgtggaatgacaaatattatatagacgaaaatgtattattggttaatatgacccgtctaaaaaagaaaatgaaagaaatcggtattgttcatttattggaaaatatacgaggaaagggttggaaactgtgagtttttttacattcttagaagaaaaaataacagagatattgtttcagcttttctttcttgccgtagtagcatttctcttgattttctacggtgtagatacgctgtttgttgtatcgctggtaattctgttcatcagcatacaagggctttttcaatggtgtttgtatcggaagaagcgtaacgcttcacaacatattattgatttagtagacggactggaagaaacctattatattgcagacgttttaccaaagccaaaagaatttcaaaataaagcctattgctacgcactaaaaaaagcctgcaaatctatgaatgatgaaatcggcaaaatcacagaggaaaagcaggactatcaagaatatgtggaaagtttcgtccatgaaattaaaataccgataggagcattgtctttgacgtttgacaatacaaaaaattacacattaaaaaaagaaacagacaaaatatttcagttagtggaacaaatgctctactatgcaagaagcgaaaatacggaaaaggactattttgtaaaacagttgcagttagacgaagtgatacataatgtcattctgaaattccgtcattcgcttatggaaagaaaagcaattatcaatatccatgacatagaaaatgtcatttatactgatgaaaaatggctgacattcattctatctcaaatcgtgcaaaatgcgattaagtattttgataagcaagaaaataagctgacgatatacagtcaagacaatggtacaaatatattgcttgtggttgaagataatggttgtggaataaaagcgtctgatttatcccgtgtatttgaaaaaggttttacgggttcaaatagaaacaaggcaaatgcaacgggtatgggactgtatctatcgaaaaaattatgcgataggttgggcttgaaattggatattgcttctacggaaaaagaatatacaagactgaccattacatttccaaaaggaacagttcataatttttcagagtaatttgaaaaccatgccaacattgatacggtgctttaagggggcttgcattatggaaagctttaagtacaattctttgcaatcaaattccacctaatagcacactattaaaaattgaatatgttttagctttaaaggctcgtacagactatatgttttgtgcgggcttttttcatacccgaaaaaaatttaaaaatttttcaaaagaggtcattaaatcacacctttcattccctatatggtgcggaaagagggataaacacttttcaaatcatagtggaaagggggtgagattgatgaaaccgtctgacttccagaaaacagttcaatgtcgctttgaaagttgtttgaagaaagttgtccgtcatattgtaaaggactaccaacaaggattgaaacgacgaaaagataaagaaattccattctgtgaacttccagaaattttcgttgaaaattttgctgtgtgggatgactacgaaacagattatacaatcttttcagtatgtggcattgatattcgtgtccttgatgatgagctggcagaagccttgaaaaaacttccagaactcgtgagctagctgatactacaagagttagttatgttcgtgcttgggaaaacagagtaaaagacgagattggaaatattaaagttgttcagcttttaccctcacatattaaagcgtattatgcgaaactttccaaagctggatatgcttattctacaatcaagtatattcacaacctgctttatcctgcattagaaatggctgttgatgatgatattatccgaaagaaccctgcaaaaagttccattagtgattatggaaaaccagcagaggaaaaagaagccttaacagtttctcaacaagaaaagtttatggagtttgtaaaacagagcaatgtctataacacatattatcctatgtttaccataatgattggtacggggttaagatgtggggagcttattggtcttacatggaaagatataaacatcaaggcaaaaacggttaatgtagaccatcagctcatttataagaatttaggcgacggttgcaagttccatatctcaacaccaaaaacgtcgtcgggtattcgtattatacctatgacacaagaagttgcaaaagcctttgaggaacaaagaaaaatcaattttatgcttgcaaaggataagagcattgaggtggacgggtgttcggggtttgtctttacagcaaaatcgggcagaccgcttatgccgaatggcgtaaatagtgttttatacaacattgtagacgcatataacaaaaccgaagtagagagagcaaaaaaagagcataggaaagcagagctgttaccaaagttttcagctcatgtaatgcgtcacacagcttgtaccagaatggcagagtgccgtatggacgtaaaagttcttcaatatattatgggacacgctcatatagatgtaacaatggaagtgtataaccatattggagagctgacaaggattgaaaatgagattgcaagactagatagtatggtgttaaatgcttgacaccacaaaaagagaaattggtgtcaaattggtgtcaaaacagaaaaaatcacaatttcaaaagaaataagatactgcaaaccattgattttaaagggtttgcaaaaaaaatctcaaaaaattagcactcacctattgacaatgccttctgcattccgaacaatttatattgcaagcggaatctggcaagcagcaggatggtcatctatcatgtatacagcagcattggcaaatgcaagcaaggagctggaagaagcagcgaccatggatggagcaaatcttctgcagcagatctggtatgtagagttgccggcaattaaaaatattattgtaattcagtttattttgcaggccggaaatattatgagtataggttttgaaaaagcatatgctttacagacagacatgaacttgccggcatcagaaatcctgtctacatatgtatatcgtattggacttctgaacggagattatggatattcgacagcggtaggtctcttcaactcggttgtaaatgttatcttgttgatctttgtaaactgtgttgttaagaaactgaatgacggagaaggattatagaaaagagggagaagagatggagaaaaaaaagaagaaaaaatattcaaggacagacaaagtaatccttggaatcggatttaccattcttggtttattcgtcctttctatagcaataccgattatctatgtagtacttgcatcctttatggatccgactgttttgaataaccagggattgagttttaatattaaggactggacattagatgcatatcgaagagtattagagaatgaaatgatctggcgtggctttttaaattccttcctgtattcacttgcatttacagttatttctgtttttgtgacattgttggcagcgtatccgctgtccaaaaaagaatttgtaggaagaaaggtttttaatattatcttcttaattactatgttttttggcggcggaatgattcctacattcattttgatcaatcaattgcatatggttaatacagtgtgggcaatcctgattccaggagcatttaatgtatggaatatgattctcgcaagaacttattatcagtcaattccaacagaattaagagaagcatctgcgattgatggagcaaatgaaatccaacatttctttaaaattatgattccggtatgtaagccaatcattgcagtactggcgctttggtctttcgttggaatgtggaacagttatttcgacgcaatgatttatttgaatgatgcgaatttgcagccattacagttagtactccgttctatcttagtacagaatacaccacagccgggcatgattgccgatattcagagcacagcggaaatggcaaaaatagcagaacagctcaaatatgcaaccattgtagtatcaagtttaccactgttagtaatgtacccattcttccagaagtactttgacaaaggaattatggttggatcggtaaaaggctaataagaaaggaatgatacagatatgaagaaaagaaaagtaaatgcattacttgcaattgtactatctctgacgatgctggtgggagttacaggttgtggaaaagagcagcagcttgaagctgaaatcaacccggatacacctgcaacggaagtgcagtttccattgaaggaaactgcagaactttcctttattacaagtgcaccggctacatcaacacaggagccaaatgaacgagtaatctttcagagaatggaagagcagacgaatgttcatattgattggacttgttttgtatcggatcagttttctgataagaaaaatctggcacttgctcaatttggaaatctaccggacggattattcaatgcaggaatgagtgattatgatctattgcgttatgcaaagcagggtatcattattccattagaaaatctgatagataaatatatgccgaatttacaggcagtatttgaaaaatatccagaatataggacaatgtgtacagcaccagatggacatatttattcattcccttggattgaacagcttggagccgggaaagaagccattcaggcaatcggagatattccatatattaacaaaaaatggctggattatctaggacttgagattccgacaacaacagatgaattggaacaggtattgattcaattccgtgatcatgcagatgaacttgaaaaagaattttcaatcgaaggtgatgtgattccaatgtcatttattatcaataacggagaccaagatccggcaattttaatcaatggatttggaaaaggttatggagatacgggagatcatttcgctgtaacggatgaaggaaaagttatttacacaactgttcaggaaggttataaagaaggaattgaatggttacataaacttgtgacagaggatttagttgacccagaagcatttacacaagagtggtccacctatgtagcaaaaggtaagaaccatcgatacggtctttgttttacatgggacattgcaaatattgataacaatgaagattatgtgatgctaccggcgctgacaggaccgaatggcatgagaaatatcacgagacagaacaacagtgaaacaagtggatttgaccgtggaagatgtgttcttacgtcaagttgtcggaatacagcacttgctgctgcatggattgaccagatgtatgcaccacttcaatcaccacagaataactggggaacttatggagaaaaggactcctttaacatttttgaactgtccacaaacaaagatggtggagaaatgctaaagcatatggatcttggaacacagtctccggtagaagtgcgtgaggcacaatcggtaaatggccctcttgcagttttaaatgaatactatgatgtatatgtaacacagccggaagatgcaaaatggcgtttggataatatgcatgaaacttatttacaggatatgaacagtaaatatgtttatccaaatgtctttatgagcattgatgatacgaataaagtatctcagtacgatacagatataaaaaaatatgcagaacagaagaaagcagactggatcctgaatggaggaattgaaaaagagtgggattcctatctaaagaaaatggaacagtatgggctttcagattatctttcaattaaacagaagtactttgatgagtatcagaagtcattaagtgaagaaaaataacgatacgaacaacaggagaatttgcatgagtgagatgttagaaaaggctagaaaatatgaagatgaacagggaaagcagataaaagcagaagacagaccggcttttcatgtgagtccgtatgtaggctggatgaatgatccgaatggattttcatactatcagggagaatatcatttattttatcagtataatccatacgatacacattgggacagtatgcattgggggcatgtggtaagtaaagacttattgcattgggaatatctcccggcagctcttgcaccagatgaagactacgataagatgggctgtttctcaggaagcgcaatcgagttggatgatggcagacaattgcttatgtatacagccgtagatcatgaaacattagaagatggaagtaaaagagatatacagacacaggcggtagctgtcggagacggaagagattatgtgaagtatgagaagaatccggtcttgacagaaaaggatcttccggaaggtgcaagtaaagtggatttccgtgatccaaagatctggaaaggaaaagacggaaacttctattgtgtgatcggaagcagaccggcagacggaagcggacagattcttctttacagaagtgcaaatggatttgactgggaatttgtcagtatccttgcagaaaataagaaacgtttcggaaagatgtgggagtgtccggatttctttgaactggatggaaaacacattctcctgacaagtccgcaggatatgttaccggaaggtttggaatatcataccggaaacggcactttatgtatcataggagaaatggacaaggatacatataccttaaaagagcagttcaatcagtctgtggattatggaattgatttttatgcaatgcagacagtggaagcaccggatggccgcagaattatgatcggctggatgcagaactgggatacgcttgctcatcgttgtaatgactcaaaatggtttgcgcaaatgagtctgccgagagaattgtctgtgaagaacggaagactttatcaaactccaatcaaagaactcgatgcactgcgcaaaaacagagttgagtacaacgatgtagtaatagataatgatacgatcacattagatcgcgtcgaaggacgaaccatcgacatggaactcgtgatacgtccggaagataaagaaaatgtatataagaaattcgcattacgttttgcacagaatgagaaattccatacagaattgagcttccgcccgtatgagtctgtattgaaaattgacagaaaattttcaggaaccgaacgagcactggttcatcagagaagatgtctggtaaatggagatgccaatgagttaaagcttcgtgtgattctggacagattcagcgcagaagtatttattaacgatggcgagcaggttatgtctgctgttatgtttacagaacaggaagcaaacggaatttcattctttgctgatggtgcagctaaaatcgatgtagtgaaatatgatctggtatagaagttacatgataaatatacattgagattgaaaatgcatggataatgataaggggattcctgattaaggaatccccttatgtagtataggagtatagtattgatgatagaagtaagaagaaaaagacatgaaaacgaactgcacgaaaaatatatgcagttgtatcataatgaacaatgttatgaagaattaatgcagtcattggaagaggcttatcagaacagacctgctgaacttagacggttagataataaaagagaaaaagaaccgaattggtatcgaaacagaaatatgcttgggataacgatgtatccgaagctatttgcagggggattaaacggtgtgatagagcatttggattatttgtctgagcagaagatcacctatcttcatctgatgccgcttctgaaaatgccgcatccatataatgacggtggctatgcggtagaggattttaaacaggtagatcctgaaattggaacaaacgaagagttggaaaagttgacaaaagagctgagaaaacgcggaatcagtctgtgtctggatgttgttatgaatcatacagcagatacgcatgagtgggcgatgcgagccaaaagagacgaacaggaatatatggatcgctatcagtgttatgagacacgcgagattccggatcagtttgagaagacgatgccgcaggtgttcccggaaactgcgccgggcaactttacatggtgtgaagagatgcacagacatgtgctcacaacattttatccttatcagtgggatctgaattatcacaatccgaaagtatttaatgaaatgataggaaatatcctgtatctggctaatatgggagtggaagtattccgtattgatgcagttccgtatatttggaaggagttgggaaccaactgcagaaatcttccgcaagttcatagtattgtccgtatgctgcgtatgatccttgaaatggtttgcccaggtgtgatcttaaaaggcgaggttgttatggagccaaaagaacttccggtttattttggaacagagcaagagccggaatgccatatgttatacggtgtttccagtatggtgaatctgtgggcagcactggctacaagagacacaagaatgctgaagcatcagatggatgtgattcacagtcttccgaagaactgctattttgtcaattaccttcgctgtcatgatgatatcggctggggactggatgaagagcaagagaagaaactggagatagatccgattcagcacaaggaatatttatatcatttctttgaggggacatatccgtacagctttgctcgtggagagctttataattacgatccggtgaccaaagatgccagaagctgtggaacaacggcaagtctgtgtggaatcgaaaaaggtggatttgaaggagatcttgagcaggtgaaacagggaatccagagagtgctgatgatgcatgcggcatgtatgagcatggaaggttttgtgatgctttcatccggagatgagatcggtcaggtcaatgattacaattataagaaaaacccggatactgctgcggacagtcgatatctgcatcgaagtccgttccagtgggagaatgcagagaagagaaaaaaaccaggtactgtacagtatgcaatctggaatggtttgaaacagatggaagaattcagacgtgaggaaaattgctttggagagactgcaggtatctctacatgggatacaggaaattcttcagtcttcgcaatcagaaggacagcaggaagagaagaactgatctgtctggctaatttctcggagtatggacagaatgcatggctgaattgtctggaaggtgaatatgaagatttatttacaggagaaaaactggagatgaattcggtatggatgaatccttatcagtacagatggtgtgtgaaaaaatagaaatctgttgagaatagaaaaaatgttgtcgctttggcagcagaatggagaagaaaatgaaaaaatatgatgtagtagcacttggagaattattgattgattttacagaaaacggaaagagcaatcagggaaatcctctttttgaggcaaacccaggaggagcaccgtgtaatgtgcttgcgatgctgacaaagttaggatataagacagcatttatcggaaaagtaggtgaagactttttcggagagcagttaagagatgcaattacagaagttgggatcgacgcatccggattatgcacagataaagaaatccatacaacacttgctatggtacatacttatccggacggagacagagatttttcattttatcgtaatccgggagcagatatgatgctgaacaaagaagagatttgtgaagaacttatcaaagaaacaaagatcttccatttcgggacattgtctatgacacatgaaggagtgcgcgaagcaacaaaagaagccattcgtattgcggaagagtccggtgcgattatttcttttgacccgaacttacgtcctccactttggaattcactggatgaggcaaaagagcaggtgttatacggtctcggacattgccagattcttaaaatctctgacaatgagattcagtggctgacaggtgaagaggattatactgcaggtgtaaactggatcagagaaagatatcagattccgctgattcttgtatctatgggaaaagaaggaagccgtgcatactataatggaagcattgtagaggtaaaaccgttccttcagaaaaatacaattgagacaacaggagccggagatacattctgcggttgtgtattacattatatctgtgaacatggaatggaagacttaaaggaagaaaacctgaaagatatgctgacatttgcaaatgcggcagcttctgtgatcacaacaagaaaaggtgcactgcgcgtaatgcctacaagagatgaaatccagaatctgctgatcgagcgagctgcagagtaatatgtgctgaaaaatagttgagaagaataatactctgaaaaacgaaacagagaggatacgcaagttacaaacgtattctctctgttttgttctcactcatatctagtaactgttcagagtcaacctccaaaatgctacgcatttcgtcggtgtggcgtatccgccaaataaaatttcaaaaacagtcttaaaaatgcaagcattttacacctgttttatgaaattttgcttggctctgaacagttacatttcctataagcaaatttcggcagtccgccttcttccggtacttttacagaaccctggatgagaggcagtgcatagtcaatgaactgctgtccgatatcggaaccatttcctgtgatccagtctaaaggaactgttttctcctgattacagatgagatttacatcttccggagcgtaagtaatgtggtaatccgcatcgtctgtacggtggaaggcaatcatcattcctgttgttcccttcagtgcagtctgcacaccgaaagaaccggaagcaatcgcttctttctcgtctgtcgcagagagcatagcggaagaacaacgctggttgacattgagctcgatggagcgaacttttacgccaaggcggtctttcacgaggttttccagatattttccggagcctgtcagcatcttgtgtccgaaagtatctacacctacatcacttgcaagctcgcagacaaatttaccatttccgtcgttgattccttcagaaatacatacaaccaggttggaagtatgctcgaaagctttctgaacatctgcaaggaactgttcctgatcaaatgcaacttccggaagatagatgagaaccggattgtcgccttcgaatttacgggcaaggacactggcagcggccagccatccggcatgacgtcccatgatctcaacgattgtaacggattttttattatcataaacagaagcgtcgatcgcaatctcacgaacagtggacgctacatatttggcagcacttccgaatcccggtgtatggtctgtcaggacaaggtcattgtcgatcgtcttagggattccgatgaaacggatctcgctgtttacagtctcagcatagcgggaaagcttgcttactgtatccatggaatcatttccgccgatgtagaagaagtagccgatattgtacttctcaaatttctcaaagagctgtgggtagacggcatctgtaaggtcttccggaagtttgtaacggcaggaaccaagataagatcccggtgttgtcttgatcagttcaagctcaccgttcgcttctaaaggtttcatatccatcatattctcgttcaggaaaccttcgattccgttgatcattccataaattgttccaatgacatcctcacgattcagtgcttcgtaaacaaccccataaaggctggcattaataactgcggttggtccgccggactgtccgacgattgcattcttcttcataaagtttctcctttggtttaagttgagatagtcgatttctgttgtcaatatattctaagaactcaataatatattgatgattcgttattactatagctgaaaaaaagaaaatttacaacaataagtcgaaaagatgatataatgagcgtaaaagaaaaggaagcgacgccaaaggcggcatttacttttcttacgccattatcgaatgaacagcctgtgtaacaggcggtagagcgcggttagcgcgggttcatgagatagtcaaacgtaaaagaaaaggaagcgacgccgtaggcgggcatttaaaatggaggaaaaaccatgaaatatatttcatttgcaattccatgttataactcagaggcatatatggaaaaggcaatcaattctattcttgttgggggcgaggatgttgagatcattgtagtgaatgacggttcaaaagacggaactcaggagattgcagaacgatatcaggaaaaatatccgacgatcgtaaaagcagttgagaagccgaacggtggacacggagatgcagtgaactgtggactggagcatgcgacaggaaagtattttaaggttgtagacagtgatgactgggtagacgaggaagcattgctgaaggttcttgatacgatcaaaggatttgtaaaagatgagtctgaagtagatatggtcattgcgaactatgtatatgagaaggtcggcatgacacataagaaagtcatccgttacgataacgttcttccggagaatcagatttttaaatgggaggacatcggacatttccgtctcgatcagtatatcctgatgcactctgtaatttaccgtacagagatgcttaagctttgtcagttagagctgccgaagcacacattctatgtggacaatatttatgtatattatccgctgccacatgttcgtacactttattacatgaatgtagatctttacagatatttcatcggacgtgaggatcagtcagtcaatgagaaggtgatgatcagcagaatcgaccaacagcttttcgtaacgaagaaaatgatctccatgtatgagcttcgtctgatcggaagcaagaagctgagaaaatatatggtgaattatctggcaatcatgatgacagtttcttctattttatgcattcgctctaagaagaaagagaatttcgagaagaagaaagaactgtgggcttatctgaagaaaaaagactataggacttatatgaagatccgttatggaattcttggacagacgatgaatcttccgggaagatcaggaagaagagtgtcttcacttgcgtatacggttgcaagaagattgatcgggtttaattaaaaaaaaaattcccatgaatatttaggacaggtgaattaataaaccagtcatgacatatactgatttggatgaatttagcttttagaaaagagtaaaagatctgaagaaaggaagtatatgacatggctgttttattttcagaaagcaagacaaaacaaaatctgatgcgtgcgttcgcaggagagggacaggcgcgaaaccgttatacatttgcggcggagcaggcacggaaagaaggaaaacctgcaattgcagatattttcctgtacacagcagatcaggagcgggcacatgcgggaagatactatgaattgttaaaagaagcatcaggaacgaatatctttattgatggaagttatccggtagatgagacgaagacgctggttcagctgttgcgtgcggcagaacataatgagcaggaagaggcggaggatgtgtatccggcatttgcagatgtagcgaaacaggaaggattctttgaggcagcagcaacatttcagcagattgcagagatagaagcagcacatagccaaagattccgtaagattgcagatagcctggagaataatacgttttatatgtgtgaaaatgcggatggaacaaaaaaatggatctgtacaaattgcggtcacatccacgaaggaaaagaagcacctgcattgtgtccggtatgtaagcacccacagggatattttcttcctggttttcttgatttgcacattggattttaggcaatgaggcatttcagaagtttttgaaaaaacgggcagatttataaatgaagaggaacagcaggtggcatgtgtattgccaatgggcttgttcctcttttattatctatatattatgaaagttccctgtccttcccaataaagaaaagtgcaatcgtatccggtccgacatggcttccggtacagaaatcataagaagtatttataaaatcacgcactttgattttctgttggatcttgtccatgatgtaaagcgaatcttcatatgcatctgcgtgtgcgatcccgagaatctgcttttctggttctacaatgttgtcacagaccagattgaccagttcgttcaatgcggatttacgtccgcgacagttcttgtaaaaaacgatatagccatctttgtttccacgtaagattggtttgatcttaagaacatttccgatggtggcaacgcttcctttgattcttccggtgcgagaaagatattttaaatccccgacagtgaagactccgttcattttttcaacataatattccagagtatcagcgacctcatccacagacattcctttggcacgcatctcgcttgcatagatggcaaggattccctgggcaagtgaggcattgagagagtcgaccagacgaatcttgtgtttctctccgaattcatctaacagctcttccgaagctaatcttgcagaattgtaagtaccactgatatttttactcagtgagaaatataacacatcctggtctgcttcgagtgcgcttcgaaatgcttcctcaaaggcagcagtgctgatcagtccggttttgatttcgcagcccctgctcatggcctgataatattcggttcctttctgacgttcttcctctggtgaaagatccgggtcaaaacaggtaatctctttgccgtcaacaagattgacgaaagaaatcacgtgaatatcgtattgttttgcagttacagccggcagattggctgccgagtcaacaaaaatctgaaacatagtatctttatcctcttatccctgtttatttttgcagtaaaaattttagagcaataatataaattctaacactgaatgaaaaggaatgcaattaagagaaaataaaatcgatttgccttagtctagtaataaaattataaaattttagaaataataatagaatctataaaagttaatagaatgcaaaaactattgaattttattgctttttacattatcataggtgagacgatgtggaaaatcaatactattggagatttatcaggattatctaaaacagcatggcgtggacgaagagcagattattgcaattaattttgaagatcttgattatgaggaactgacagaatataagtaactacagcgactatatgtagtcgctgaaataaataccgtagtttcggggctttcagcccagtgatcacgagttttgagaggagaaaagaacttatgaaaagaggaaaaaagattctggcattcttgctgatcattacaatgcttcttccatttgtaatgaatattccggcagaagcggcagaaaaaagcaaacagttagatgttttgtttacgcatgacacacactctcatttaaacagtttttcaacaattgtagatggagaacagaaagaagtcggcggatttgcgaagctaaagactctgattgacgagaagaagaaagagaatccggatacactgatactggacggcggtgatttttcaatggggacgctgattcagacagtttatgacacggaggcagcggaacttaggatgctgggatatctcggatgcgatgtgtcaacctttggaaatcatgaatttgattatcgttccaagggactggcagacatgctgacagcggcgaaggattccggcgagacggtaccgagtcttgttgtgtgcaatgtagactgggacagcatggaaatgaacggattaagtgaagggcaaaaacagatccagtcagcatttgaaaactatggcgtaaaggattatgtggttgttcagaaagatgatgtaaaaatcgccgtagtgggcgtgtttggagtagatgctctgaaatgtgcaccgacctgtgaattattatttaaagatccggttgagtcagttaagaaaacggtagaagagattaagaagaatgaaaaggtagatatgattgcctgtgtgtctcacagcggaacctgggaggacgagaaaaaatcagaagatgagatccttgcaaaggaagtaccggatcttgatctgatcatcagcggacatacacataccgagttaaaagagcctattcagcacggaaatacttacattgtatcctgtggagaatacgcaagaaatcttggatcactttccatgacacagaaacaggatggtcgttgggagataacttcctacgagttgattccggtatctgaagatattgagccggatcaggcgacacaagagcggatcgatgcgctgatggatacagtagatactaattacctgacgaatttcggatatacaagagatgaagttcttgccgagaatgatgtcgaattcaacagtctcgaagaaatggagacgaagcatgaagaactgaatcttggagatattatgtctgattcgtatatctattctgtagagcattcagaagactataatggaaccccggtggatgtagctgttgttccaagtggctgtgtgcgcgacacatatacgaaaggaaatatcactgtagaagatgtatataattcattttcacttggaataggaaaagacggattggcaggatatccgctgattgatgtttatctgactggtaaagaattgaaactggcagcagaagtagacgcttcggtttccgattttatgacaactgcaagattatattgcagcgggctgaatttcacattcaatccgcatcgaatgatcttgaataaagtaacagactgttatctgacaagagaagatggagagcgaatcgagatccaggatgaccagttataccgagttgtgacggatctttataccggacagatgcttggctctgtaatggaaatgtcttatggtctgttgaagatcgagccgaaggataaggatggtaatccgatcgagaatctggaagatcaggcaatcatggaaggcgataaggagctgaaagcatgggatgcgatcgcaagatatatgaagtcttttgatgatacagatggcaacggcatttcaaatgtgccggagtattatgagacgacacatggacgtaaagttgtagatgaaatcagaaatgtgatcgatcttgtgaagaatccgaataagttttcagtgatgatcgttggtatcgttctggttcttattctgatcattattctgttggtagtattgattcgaaagttaatcaagaagagacgaagaaagaaaaaatagaagattgaatttataagagcagcggctgaaaatggaagtttcggccgctgcttttcttaaagcaaaacattaattcagtcttttgataaaagataatggtgtcatgtgatatttgactttaaaggctctgtgaaaataagaaagattatgaaagccaacggagagtgagacttccaggatggaagtttctccatgttcaaataattccactgctttttcgagccggacattattaatatattggatgcaggtcatgttcatatgctttttgaaaaaacgcataaaatgatattcactgaaatagcaaagctctgcaagttcagaaattgtgagaggctcagcatagtggagatcgatataatcgagtacatttttcagcttatctgaagaagcagaaatagttgcagactccgtggtgctatattgaagtaggagaaacagtgcctgcaataggactgatttcagggcaatttcatatccaaatgtttgttccgtatagagtgaagccatttttataaagcattcatgaagagaatgatgtgcagggtgtgtggatgaaatatgataaggcaaggtcaattcatgatttatcataggtgtaagataacgggtggagcatatatctgttgcatttccccctaaaaagttaacatgaaacacataggtttctgagcagaaatcatcagttccattcaggcggattgaatgtaaaagcagtggtggaatgaataacagatcaccttcatttacttcatagtcaactaaatcaatttgataaatacaggaaccttttgtcatcaaagtgagttccgcttcttcgtgccagtgagtcataatgaccggggaatttaagttaagttttgtaatatatttttggatcggaaagaatacttctccatgttttgtattttctttttgctctaatatgagtgaatgtggaacgttcatacgagtcccctcctaaaatagcagtattgtgttatacaatgaaaaaataatgcaagaattcatgcaaatataatcatataatagcagtataatacaggcgatgggatctggcaatacgaaagcttatgggatcgtgacgcaatattatgtggaagataaaatgatgtgaaagaggttgataatatggaaaaaaagtggtggcatgacaaggtagcatatcagatatatccgaagagttttcttgatacaaatggagatggaatcggagatttgagaggtatcatatcgaaactggattatttaaaaaagcttggaattgatattatatggttatcaccaatctataaatcaccatttgtagatcagggctatgacattgcagattattatgcaatcgcagaagaatttggaacgatggaagaatttgatgaattgctggcggaagcgaaaaagcgagacatgcatattatcatggatctggtaattaatcattgttctgacaaacatgaatggtttcagaaagcattagcggatccggaaggagaatatgcggattacttctatttccgagaaggaaagaatggaaatccaccgagtaattatcgttcttattttggcggaagctgctgggaaccggtgccgggaactgataaatattattttcatatgttcgcaaaggaacagccggatctgaactgggagaatccgaaattaagacagaaactctatgatatgatcaactggtggctggaaaagggactttccggttttcgaatcgatgcgatcattaatatcaagaaagatctgaaatttcctgattttgaaccggatggggcagatggcatggccggctgctggaaaatggttgaaagtgtagatggtgtgggagaacttctggaagacttaaagaaaaatacattccaaaaatacgatgcatttacagtgggagaggtcttcaatatgaaagcggatgaattaccggaatttattggagaaaatggacatttctcaacaatatttgactttagtgcacattgtctcagtgatggagaacatggatggtatgatgctccgaagatggaatttcctaaatggagaaaagcaatcttccagtctcagatggaaacacagaagtatggatttaaagcaaatattatagagaatcatgacgaaccgagaggtgtgtcaagatttcttccagcttatgcccagacaccggcgggaacgaagatgcttggtacggttaatcttcttctcagaggaattcctttcatttatcagggacaggaaataggcatgaaaaatgcgaagtggaacagcattgacgaattcgatgatatcagtacaaaagaccagtatcagattgcccgtgaagctggattatctgaccgggaagcaatggaagcttgtaatcggatgagccgtgacaatgcgagaacaccaatgcaatggacaagcggggagaatgccgggtttacaaaaggaacggcatggttaaagataaatcctgattacaaagagatcaatgtcgaagatcaggaaaacaatccggattctgttctgaattattatcgaaagttagtagcactgcgcaaatcagatgaatttaaaaatgtatttacttatggagaattcattccggaatatgaagaaatggatgatatcctggcattttatagaacagacgcagcaaccagtattcttgtcgtggctaatttcggaacagacgcagcaagcattgaattgaaggggaatgtgaaaagagtattaatgtcgaaccagaagaacgagacagtagattatacaaagaacaggctgaatctgaaaagctgtgaggtggttgtcttagagatgaaaatggaataatctgctaaattacttcataaaacatagaaataagagatgaagtaaggtgcagccttcgtgagccagaaaatagaaaatcaattgaatcttgcattaagtatcacagaagaagaacgtcagaaaagcgagagtctggatatcggatatgatctggaagaaaaagaatgggaattgatcgtgaagtattccgggacgttagagcgagtaagaacacgagctgtttatgtgacggaactgacaggtggatatgccattatccaaataaaagaaagtcagataaaagaactggcagcatttccagaagtagaatttatagaaaaaccgaaaagtttatattttcaaatagagaatggaaggcgtgtgtcctgtattgatgaagtacaggctgcgccttttttttcttcgattgggcaagagggtttagaggataatcagcagaaaaaacagtcatttccactgctgggaaaggacgtattgatcggaattgtagacagtgggattgattatgaaaatcccgattttagaaatgcagatggaacgacaagaattcttgctttatgggatcagacgttacaaaacggtaaaccgccgcaaggatatcatatcggaacagagttcacttcagaacagataaatgaagcactacgcatggaagtcagggaagaaaggtatcgcatagtaccaagtcgtgataccagtggacatggaacagcagtagccgggattgcggctggaaatggaaggggtagtaagaatggaaaatatcggggagctgcacccgaagcaggactgctgattgtaaagatggggggagcagggaaaacaggattcccaagaactacccagctgatgcgaggtgtggattatatcgtacgaaaagcggaagagttaaaaaagccggtggcgatcaatatcagttttgggaatacatatggttcccatgatggaacaagtcttttggaaagatatttgaatacagtatctgaacgttggaagaatgtgatttgtgtaggaagtggaaatgaaggaacgactgcgggacatgcggcaggtgaatatagaaaaggaatgatgacagaagttcaacttgcagtacagcagagggagaagtcattcagtctgcaaatttggaaatcctatgtcgatgaagtcgcaattacaattgtcgatccatccggaaatcattccggcagactggaagaaaaagaaggaacacaaagaatacagattggtgaaacagaactcctggtttattatggagagccaaaaccatatagtattcgtcaggaaatttatattagttttctaccacgaaatgaatttgtcacagccggagtgtggaaaatacagatgatgccaggacaggttgtggataagttgtggcaaatgtggcttccggtacagaatgcacttaatatcggcactgcatttttaaagccagacagttccacaacacttacgataccttctactgcatctcttgttattactgtggcagcgtataatgcattgaccttttcttatgcagacttctccggacgaggaccgacacagatatatgagggggaaaatgcgaacaaacctgatctggcagctccgggtgtgagggtaatggctcaggtagcaggtggaggatatgcagagttcacaggaacttcatttgcaacgccattcgttacaggaagcgcggcacttttgatggagtgggggattgtgaaaggaaatgatccgtatctgtatggagagaaagtgaaagcatatttgcggagaggggcgagacagattcccgggtatgagaggtggccgaatgggaagttggggtatgggaggttgtgtattgttcaaagcatccctggtatgtgaaagttaaatgttttcatctgaaatatttacaatctgtgattttcgaagaagaataccttttgtaatattcacaaatttcttcaaaatacaataaaacttttcaaaatcaactttaagctcttgatgatagatgattattttgaacttaaattaatatattgaaaaatatctaaaatttgcatgtgtttacttgctttaaattcataaagatattgttgcttaagtgtgcttgtgttaaaataaaaacaaaagctaattcaggtttgaaaaagaacagaacaaagggggcatgacatcatgaaaagaaaaaagtaattactttgattgtcgctgcattggcatttaccatgactggctgtggccagttcaaccgcaatttcagtatcggaattaacagcggaaagcaaaccggctacccagtatacgattgatgcaaatcaggaagtttatgcattgctggattttgaagatactgcggagtttgagaatgcgaccaaatatgggctggtatgacgctaatcctgtccatcttgctgaacttacaccatcggattatgcccaaaagctggtagaatatttcggtgatacagatgctgttcagaaaaacgcagagaatgttgctgctttgatcgaacaggagggtgatgagacctgcctgacacgattgatggatgcggttactgttacgtcagagtataaatattttaatattattgaaccataaagttttggggcggaagcaggaggatatgaatatgaaaagatttgcagcatctgttgacagtgagacagatgaaaatatatgggagacagtggaagatgcttatgtttatgcatttccgctggtgctcatggatgcgactgagacctcggcaacgaacacagaggaagttgttaacaaaaaagcacctgtaaatcagtttatacacagtgttgcactggcagatgcacaattcaggactgtggtgactcctaatgtggatacgatctattcacaggtctggtatgatctgagcgaggagccgatggtctatgaacttccaaaaacagatcgtttttgtaaggttcaggtactggatggatggacaaatactgctgcggttcttgataaggctggtgcatatgcaattactctttctacgtgggaagggaaactgcctgagggagttacccgtatagatgttcctacatctatggcatggtccattaccagaatcgttttatcaggagaagaggatcttccaaatgtgtatgccatccaaggaaaaatgaaacttatgccgctttccgattatatatccggagacacttatgaacctccgaggggaagctacagcgaagagaatgattatattcctgttgataaggtcctttccatggatccgatcacattttttaataaggccaatgagttgatggtaaagaattctccgacagctgcagataaggaaatgcttgaaaaaatagcagctgtgaatataggtcctggtatggaatttgacatttctgttcttaccggtgatgttgcagaaaactggaagacaatgctgacagaaattcagctaaagcttatcaaagagggccagaaattttcaaaaaagcttggtcagtgggattattttggtgaaccgatcggagatttcaatacagaatacgcttatcgtgcactggtagctcttgcagggcttggtgctaatacagttgaagttgcgctgtatccaaagatagagcaggatgcggatggaaatactctcacaggagaaaaatcatatattcttcatttcgaaagctatccgcaggttcttgaagggggattctggtctgtgactgcatatggggacgatgatttcctgattgataatcctattaatcgttactgcataaatgaccgttccggtttacaggcaaatgatgatggttccgttgatgttattctgtctgaagatgccccacagaacaccataaactggcttcctgtgggcgctggaggtttccatctgtttatgcgtatctatacgcctgatatggacgccctggaaacgtggatggcaccgaccattacagagatttatccatcaaatgtgaactaaatattttcacattgtacagaaagaggattgattcttctgaaaaatgtgctagaataaagaaaaaacgaatattagataccagagatttgagcaaggtagatgaaacgacaggcagtcgttttatttgccttgctttttttgtgtgataaaggagagggatggatatgtttgatgttgttattattggtgcaggagtgacaggcagcgcgattgccagagaggtttccagatataagttgaatacgtgtgtgattgaaaaggaagaggatgtctgtaatgagacatccaaggcaaacagtgcgatcatccatgcgggatttgatgcagttccgggaacgatgaaggcaaagttaaatgtgatgggaaatgcgatgatggacagaatcgcagaagagcttgacattccatttaagagaaacggctctttggtcgtatgtacgaaagagcaggatccggaaggacttcaggttttaatggagagaggtaagaaaaatggagttcctggacttcagattttagacagagaggctctgattgagaaagagccgaacctggcagatgatgtgacatgtgcgttgtgggcgcctaccggaggaattgtctgtccgttccatatgacaatgggatatgcggaaaatgcatacgagaacggtgttcggtttttcctgaatacaaaagttgaaaaactgaaaaagacaggagaaggatttagagttcaggttcatcacgcagatacctgtgttgatgagacaatcgagacaaaacttattattaatgcagcgggagtttatgctgatgagatcaataatcagctttcagacagaaagcttcatatcacagcccgtaaaggggaatacatgcttttggataagacagttggagattatgtgaagagtacaatcttccagcttccgtcgaaaatgggaaagggagtactggtcacaccgacagttcacggtaatctgcttgtaggtcctacagcagtaaatgtagaagataaaggtgctgtaaacacgacaatggatggtctggatcagatcgcaagagtttcctctcatagcgttaagaatgttccgcttcgtcaggtgattacttcttttgcaggtcttcgtgcacacgaggatggagatgattttgtaattggtgaatcagcggatgtaaaaggactgatcaatgcagcaggcattgaatctccgggactttcttcagcaccggcaatcggtgttacggttgcagaacttgtaagagaccttttgaatgcagaagaaaagtctgattttaatccggtgagacatgggattttagatccggatacgctttctctggaagagagaaatcagctgatcaaagaaaatccggcttatggaaatattatctgccgctgtgagatgatcacagaaggagaaatcctggatgcaattcaccgtccgcttggtgcacgctctctggatggagtgaagcgcaggacaagagcaggcatggggcgttgccagtcaggattctgttccccgaaggttatggagattctggaaagagaagttccgatgccggttgataagattggcaaaaatggcgttggatcggaatttatcgtaggtgaaaataaagaactggaggatgagtaaaatgaaaacatatgatttaatcataattggtggaggtcctgcaggacttgcggcagcagtcgcagcaaaagataacggaattgacaacattttgattttggaaagagataaaagtctcggaggcattttgcagcagtgtattcataatggattcggtttgcatacatttaaagaagaactgacaggacctgagtatgcagcacgttttattgagcaggtagaagaacgtggtattgaatataaattaaatacaatggtcatggacatttctccggaaaaggtagtaaccgccacaaaccgcgaggatggaattctgcttcttcaggcaaatgcaattatcctggcgatgggatgcagagagcgttctagaggagcactgaatattccggggtatcgtccggctggaatttattctgccggaacggcacagcatcttgtaaatatggaagggcttatgccgggaaaagaagttgtgatccttggatctggagatatcggtctgattatggcaagacgtatgacactcgaaggggcgaaggttaaagtggttgcagagctgatgccttattccggtggtttgaagagaaatatcgtacagtgtctggatgactttgagattccgctgaagctgagtcatacagtgattgatatagaaggaaagcatcgtgtggaagctgtgacaatcgcagaagtcggacgggatcgcaagccgattcctggaacagaggaaagatatacttgtgatacgttgcttctttcctgtggactccttccggaaaatgagctttcaaaaagcgcaggagtagaactttcacaggttacttcaggtccggtcgtaaacgattcactggaaacaagtgtggacggcatcttcgcatgtggaaatgtattgcatgtgcatgatcttgtggattttgtatctcaggaggcagcgactgctggaaagaatgcagccgcttatataaaggcaggagaaaaggatgtgcaggcagaaatgcttccgatttctccggaaggcggagtgcgctacacagtaccatcctttgtaagaccttctgaaatggaagaaaatctgacagttcgtttccgtgtcggagatgtatataagaataaggcgattgcagtgtattttgacgatcagctgattggtaagaagaaacgtcaggtaatggcgccgggtgagatggagcaggtaatcctgaagaaaaagaaactggaagaatacccggagacaaagaagatcatgattcggatcgaggaggcataagaaaatgggtgagagagaattaatctgtatcggatgcccgatgggatgtccgatcgttgtaaaaatggaagacggaaaagttgtatccgttacaggaaatacttgtccacgtggagagacgtatgcaagaaaggaagtaactgatccaacgcgtattgtaacgactacagttcgtgtcgcagacggaaaagtaccaatgatcaatgtgaagacagagcatgacatttcaaaagataagatttttgactgtatcgcagcacttcgcggcgtaacgatcaaagctccggttcacattggagatattgtgttggaaaatgtggcaggtacaggtgtaaatatcgtagctgccggaaatgtggatgcagtacactagacgattgtgaaggagatatagtataatttatgaaacagatgccagatacaagtactgttgttcacagtttctgtgtctggcattcatttgatcttggcggaacaaaggagaattgaaatgaattataaattcctggatgcgttggaggtatcccctgtgattgcagcggtaaaagatgatgaaggagtagatgcctgtctgaaaagtgaaagccaggttgtatttattttatatggagacatctgtacaattccggagattgtttctaaagtaaaagcagcaggaaaactggcggtagtacatctagacttgatccatgggctggcatcgaagaacattgcagcagattttatcaaaaaatatacagaagcggatggtgtaatttccacaaaaccgacgatcattcatcgagcgaaggaacttggaatgctcacggtattgcgcgtatttttgattgattctatggcttatgaaaatgtgaaaacacaggtaacggcagcaaagccggatgtggtagaggttcttccgggaatgatgccgaaggtgatcgaaaatatctgtaaagatcttccggtacctgtgatcgccggaggaatgatccgggagaaggaagatgtaatggcacttcttaaggcaggagtgaccagtgtatcgtctacgaatccggaaatctggtttgaataagcttttatttttttatcttctttaatttcagccacccggcatgaagcatgtatacaactgcaggaattaaggagagcagttgtgtgtatgtataatctgttgccagagatacaggtgaaagcacaacatggaatgcaaggaagaggaaagctccggcggtaatcagattacaaaggagatacttccagccgaagattcctaaagcagaggctgtcaggagtgccaccagcgatatcgtatcaagtggaaccggcaaatgaataaaatcatattttgcagaaaaaagtgtcaggatcgcgtaaaggaaaagaagcaggttcaataatcccatgatcttgaacaataaactgtaaaaaggtgtgaccgggcaatccggccacaattctacatccagtttttcagcaagttcaatcgcggagcgggtgaatgttgtgtttgtcattacgatgaccttgtcacagtcataaaaattcgcaccggcataagcttcctggaccgctttgttaccaacgggatacgtgtaatacttacactgtatcccgtatttttttctgtgtttacaggcaatgatgtcaacgccttgatccccagaacttttagtaacttctatttttgaaaaatgttttctttttagtatgatcgcacactgttcttcgaactgatatccatccatgtgttgctgcttctcctatatgctgtctgaaatcatgatgttggggtcaaaaggtattttgacccctatgatacacggattgcttcgcatttcatgctctcgcaatcctaaaacacctcaaatccgctcatttttctacgaaaaatggctacttttcggtgttttgcgggtcaataagtcatgctttttcatgcaagcaagaaacgcatgaccttttgacccttgtatcaaatcatttaagtaagaagaatgcggggaggcattcttcttacgtgatcaggtagaaatagaatagcatatttcagaaaaaagaacaagtgttcttttttacattccgtccttcagtacattgtgatcacgcagtaccttttcaatcacatttccttttacgagcttcagaagaggtttcttcagtgcgttcagcggtccaggtagctggatctcaagtggagattttccgtccataagttttacagagctgtcgagaagctcgcggatatcataaacacttccccatacttcaggcacaccacggtctactttgagaagtccataaacggcttccatagcagtacgtacagaatactctgttgtgaaaacagtatctcttggagtttcagcaaactgtccgaggaaagcgaagttgacacatccatccgggataacatccgggcggtcaccttttgtacgtggcatgaagaatgctgtgatgtaaggcatcattgtaggtacacagattgcactgttttctgccagatccatgatctgatcttccggaacaccaaggtgatagagccattctgctgtgatttcttttccggtacagtctttcataggcttcttgatatagtcaccaggcacatcagtaaataatccataaacccagacacataccttatctttatcctggtctttgaactgtccctgacgattgatcgtccagcttaacagccagctggaatcctggcagctgacgataccgccggttacaacatttccggtgcgagggtcacgtttgcaaatgtctgtgatataaggaatgatcttgtcatccagagttgtaactgttgcagattcccagtttgtcttggaaatgtcggaacagaatttttccggatgtccgaaggatggatcctgacgggcaatgtttttccaaaggttccatacaccgcttgtacggacttcggcatccccgtttggtgcatggttctgatctccgtaaatggttccctctgtacagcttccgtttgtgacaaatacgaggtcattttctgtcaggacgatacctctttcctgtccgtttactttacattcaattacagatgcaatctttttgtctccttcgaatttgaatacaacatttgtgacttctgtattgaactggaagtccacaccggcatcttcgaggtatctctgcatcggaagaatgagggattcatactgattatatttggtaaatttcaatgcactgaaatcaggcagtccggcaatatggtggataaatctctggaaatataatttcatttccaaagcactgtgccagttttcaaatgcaaacattgttctccaatagagccagaaagtagaatcaaatacttcttcgtcaaaaacatcttcgatagttttatcgtagagatcttcgtcttttgtcatgaagagtttcatgatttccatacagcccttctgactgaggttgaattttccgtctgtatgtgcgtctttgccacgatttacagttgcacggcaaagggaatagttcgggtcatgtttattgagccagtaatattcatcaagtacagaaacaccaggtgtctcgatggatggaatgctgcggaagagatcccacagacattcaaaatgattttccatctcacgtccaccgcgcattacataacctcgggaagtatcatagattccatcacatgcaccaccggcaatatccattgcttctaaaatgtggatctggcatccaggcatctgtgcatcacggacaaggaaacatgccgctgccagagaggcaagtccgcttcctacgatgtaagcatttttctgatctacaccttccggtttctccggatgtgcaaatgcttcgtagtttccgttggaataatagatgcctttgctgttgcggtcatattttccgcgctccgtgttacgatagttatctggaacggaagaatcagcaacagtactcttcttaaaaatagaattaccggattctgaattaccagattcttttttggccttctgtgcgagataaattgcagttcctgttcctgctgctactgcagagattacaccaagtttagatttcttatttgacataataaaaccacctttctgaaaaaacggattcatgtctcgttttgagatcatctcatcataattactctaaataacgagatatgaagtatagttgttatagttatagtatggacatttttaaagattttcaatttacaaaaagaggcaagtgataaaaaacttatcatttgcctctttttgtaaagtataggtttagtatatttgtgttatgaattttcttttttaggaagtgctacaaaattttcaattgaatgcgtaaggcttccgtggatggtaatactgatcttatgtgccagatcgacataatcgtctttcattccctgtttgatccagtcgagcataagaccgacaaagctgtatttataaaaatcggcaataaagcgccggtcttcttcagaaatactggtgccttctgctttttcctctacaacattcatcagtaaatcggaagttagatgaaaaaggaaactttcaatttgatcccggctgatgcagcggtaagcatttaatataaatggcttattttcatacacagcatcaaaaatctgtaccagtccttcagaccaggtgtcgtaagtttttttgccggcaagagcgcgggttgcatcttccaggcaggaccattcgaccagatcataaatatctttaaagtgatagtagaaagccatacggctgatgccgcagtcttcggttaaatcgcggatggttatcttatcgagcggcttttgaagcattaattctttcagagattcttccaatatttgttttgtctggtttatcatagagggtccctccgtttgttacgaaaattaagtgtgactataatttatagtatcacattttccaaaacagatagcaagtattacaccatttttaaaaagcctctggtgatgtattttattatgggaaaacaaaggagattctgttataatctttaaataaagtaaaagtaaggttataaagatatgaaagaaaaagaaaagaaaatcacacggattctgcgtattttcatgatgcttcttatctgtatcctgattgcattattctttggaattatgatattggtcagcgatatgcaagggacggctcgtgtagtgaattatgccggacttgtgcgtggaaagacgcagcagatcatcaaactggaaaatgcacagagaccacaggatgaaatgatcagggaagtggatgcgtatattgatgggttacgttatggcagcgatgaactgaaccttgtccgtctggatgataaagcatttcaggataagatggaagtgcaggaacaattttttgaacaactaaaggaagaaatctataaggctcgagaagaaggatatgagaatacacagattataaataaaagtgaaacattttttacaatctgtgatgagacaacagggcttgcggaaagttattcgcagaagctggcatcttccttaaatcgtctggagaaaatcgttgtcgtggatattattggaattgtgtgtctgttgggatatgagcttttcaaggcattacggtacgcggcgcaaaaccgtgtgcttcgtcagaaggtttatctggatgaggcaacaggacttccgaataagaataagtgcgaggagattctggcatctgaagagccgcttacggatagggaatcaacagcggtaatggtgtttgatttaaataatctgagaatcattaatgaccggcagggacatgaaagaggcgatcaatatatcagatcatttgcagaacaattgcgggcagcacttccggagaaatattttgtcggaagagacggtggagacgagtttattgcagtgttaaagcaggtggatcataagcaggtgaaagactgtctgcagatgatacgggaacagacggagcgttattcaaagaatcatccggatatgctacttagctatgcagtgggatatgcattgtctacagattttccgggaagtaatatgaaagacctgttccgatatgcggataagaacatgtatgtagacaagaatcgggcgaagatgaaagaagcagctgacaagcggagaattaggagtcggctgttacaatctgtaaaagaaaaaggatttcattttacagattgtctgtactgtgatgcgattgtggatcagtatgttgttcttcgtgcaagctcagaatttttccttgcagatgatggtagttattctggtgcagtagagcagattatacaggagctggcggaggaagagaaccgcagggaactctggaagaaacttcagctgtcggaaatccgggaaacactgacagaggaacatcaggtagaggaatatttttattgtcacaaagatggtgacagagttttgcgtggccggatcacacttttactgcctgactttgctgaaaatggaaatctgcatcattttcttgttgggtttgatgtttatcaggacagggacagattgatcgtaaatgagaaaaagcaactaacacagttctatgaacagctgacgcagtccattttggaaaacggaaactatatagaagcattgatggatacagcagaaataatccaaagtgttaatctgacacagaatttattagaaaagatattttggcaaaacagggaaaacaggcagattccagacataaaacttccatgtccttatgatacgtattgtaagacctatcaacggttcgtgacaaaagagacgagagaaaattatcgtatcacagaaaatccggcacagctgatcgaacgttttaaagcaggcgaaaagcaggtgactgtggaatatcaggtagagcaaagtgatggaagcagatgctggtggcaggagacagtcctgatgtcacaggagatggtttatgaaagtaagacgaagcagacaagtactgtgatcggtgcaattattttgttcaaggatatttcagagttccatgagcaggaagacagagaaagagaacgtctgcaggttgcatacgaaaaagcggatctcgagagccgtgcgaagacagaattcatgaatcggatgagtcatgatatccgtacaccgatcaatggtattctcggaatgatccagatgatccgtaagaactataaggatcaggaaaagatagaagagtgtgttgataaaatggatctgtctgtccaacatctgagtgaactggtcaatgatgtacttgatatgagtaaaatagagtcaggatatttagagttgcagaatgatacgtttgatctgaatacgttgatagatcaggtagaagttgtggtcagtgcacaggtagaggcaatggaaatcagctatgagagccatcgggaaaaggtgaatcatacgatgctgagcggagatacgctgcagatcagaagaattatgctgaatctgttcagtaatgcaatcaaatataataagcgtggaggaaggatagacacttatgtaaaagaactttcttttgatggaatgtgtgcggcattcgaatttcgtattacggatacaggtgtcgggatgagcagggaatatataaaagaagaattgtttaagccttttacacaggaaataaatgatgcaagaacgcagtataaaggaacggggctgggaatgtcaattgtaaaaggactggtcgaaaagatgggtggaacaattcgggtgagcagtacgcccggcgttggaacggagttccgtttttatttgagttttccagtagttcagccggaaaaggaaagccagaatgaagaatgtgtgcagagaacaaaacaggatctgaaagaggataaaccgctcagaggatatcatattcttcttgccgaagataatgagatcaatatggagattgcagagttttatctggaagaagctggtgcacaggtgacaaaggcatggaatggacgggaagctgcggaactatttaaacagtcggggctaagagaatatgatgctgttcttatggatatcatgatgccggagttggatggaaaagaggcatcacgaaagatccgctctatggcagaccaaagggaagatgcagccgagattccgattttggcaatgacagcacaggcgtctaccgaaagtatacatcagtgtaagtcagccggaatgaatgagtgtatctttaaacctgtgaacgcaaaagaactgatcagattacttcaggatatagttgcaaaaatataaattgagagggaaggaaaatgcacgaattaggtgttgtcttttatgttgtaaaagatgtaaagaaggttgcggaggaaaatcatgtggagaaggtttctgccgtgacactggagattggggaagtgtcaggaatactacatgattatctgacggattgctggaattgggcgaagaagaaagaaccgcttatggaagaagccgaactgaaaatcgagcagatagaagcagtaacattttgtgaagaatgccagaaagaatatccaacggtagaacatgggaaaatctgtccgtactgtggaagtgaaaatacctatctgcttcgtgggaatgaatttttaataaaagagatagaagtatcggactgaaaaatcagcgtcttacctattgtcaaccgctttgatagatgatacaatacgaaagacttaaaagaatcacaggtgttgctgatcacagcagcccgtaaacatttcttacagtttctagtaatacacgagttaagcgaggaaaagaattatgcgtcagattatctatgataaagtgaaatacattgcagacaaatacaaaggatatattgatacggaagatttgatgaaggaaggacttacaaatcgtcagattggtctgttgacagcagaaggaaagcttgagaaggtagcacatggacattattggatcattagtccggagttttccaaaccggaagattataaggcagtggaagtggcacgagtaaatagaaaagcggtaatctgcgcagacagtgcatgctattacatgggcctgattgataaagagccggagattctttcaattgcaacaagaagaagtgaccgtcacaagatgaagatgaattttgaagtcagcagacattacttctcagagcaggcttttgaggatgagaagcatgtgtttgatacaaagtacggttcttacaatgtatatggaattgacagaagcgtgtgcgactgcatccgtttccgtgaagacattgataaagatatctttgaacttgttattgagaactacagaaagtacgataagaagaatgaagaacgtctcatggcatatgcaaaagcaatgcgtatcggaagacaggtagagagaatcggattggatagatagtctataataatgatataagagagtctgtcattttgacaggctctctttaattaaaataagagaaaggaaagagcacattatgaagacattacttgcatatctgaaagattataaaaaagaatccatacttgctccgttgttcaagatgctggaagcatcttttgagttgtttgttccgttggtaatggcggcaattattgatgtgggaattgcaaatcaggataagctatatattgtgaaaatgtgttttgtactgatcgcgctgggaatcatcggacttgtctgttccattacagcacagtattttgcagcgaaggcagcaacaggagtcggaacgggaataagacatggattatttgaacatatccagaaatttacatttacggaaatggaccaattaggaacatctacattgatcacacgaatgacaagtgatatcaatcagatccagtcaggtgtgaatcttgttttacgattgttcctgcgttcgccgttcattgtatttggtgcaatgatcatggcatttacagtagatgtgaaagcagcacttgtatttgttgtgacgattccgcttctttcacttattgtgtttggaatcatgcttgtgacgatgccgatgtataagaaagtgcaggcagatctagatcaggtacttcttgcaacgagggaaaatctgacaggagcaagagttatccgtgcattcaataaagaagaggatgagacgaagcggtttgaaaatgcgaatcaaattcttacagatgcgcagaaatatgtgggacgcatttccggaatgatgaatccgctgacatatattattgtaaacggagcaatcatagcattgatctatgtcggtgcagtccgtgttgatatcggagatctgacccagggacaggttgtggcacttattaattatatgtcacagattcttgttgaacttgtgaagttagcgaacttgatcatttccgtgacgaaggcagcagcatgtctgaaccgtgtggagagtgtgcttgctgtgaaaccagatatgaatgagggagatgtaagatggaagagcaattcttccgaaacagattgggatttgaaaaataaaattccggtcgtagaattctctcacgtatctttgacctataaaggagcttcagatacatccttatctgatataaatttctgcgccaagaaaggacagacgataggaatcatcgggggaacaggttcaggaaaatcgtctcttgtgaatctgattccgagattttatgatgcaacagacggtacagtgaagatcaatggacgtgatatcaaagaatatcagacagagaacctaagagaacatatcggtgtcgttcttcagaaagcagtgcttttcaaagggagtattgcggacaatctccgctggggaaaggaagatgcaacagagcaggaaatgtatgaagcattggacatttctcaggcaagagaatttgttgatacgaaacaaggtggattagaatttcagattgaacaggggggaagaaatctttccggaggtcagaaacagagaatgacgattgcgcgcgcactggttcggaaaccggagatcctgattcttgatgacagtgcatcagcgttggattttgctacagatgcggcacttcgcaagtcgatcaaagagatgaaaaaccagccgaccgtatttatcgtatctcagagagcagcatctattcagcatgcagaccagatcattgtgttggatgatggagcaatggcgggaatcggaacacatgaagaactgttgaaggattgtccaatctatcaggaaatctattattcacaatttccaaaggaggcggtaatcaatggctgataaaagaaagacaaatagtgagaaaaaacagaaaagtcaggcagcaacattgaaagaagtaatctgccgacttggaagatacagaatttttctcgtattttcaattctgcttgcgactgtgtccgttgcgcttacattatatattccaaagctgacaggacatgcagttgattatgtgatcggaaaaggcaaagtgaattttccgggagtaattcaggtgatgattcagattggtgtgtgcacactgatcacggcattggcacagtggctgatgaatgtgtgtaataacaagatgacctatcagatggttcaggatatcagaaatgaagcatttgataaaatagagcagctaccgttgaaatatattgatggacatccgtatggtgaagttgtaagccgtgtaattgcggatgttgaccagttttcagatggactactgatgggatttacacagctttttaccggtattgcaacgattatcggaacattttgttttatgttatccgtaaatgtatcgattacatttgttgtggttcttatcacaccggtatcattctttgtagcaaattttattgcaaagagaacatttcgtatgttccgcctgcaatctgaaatacgtggagagcagacaggattgattgatgaaatgatcggaaaccagaaagtggttcaggcatttgggcgcggagaagatgcaacagagcgtttcgacgaagtgaataaaagattgcaggaggcatccttgcgggcaacatttttctcatccatcacgaacccggcgacacgatttgttaacagtctggtttatacaggagttggaattaccggagcatttgcagttgtacgcggtgcaatgagcgtaggacaattgtccagtttcttgagctatgcaaatcagtacacaaagccatttaatgagatttccggagttgtgacagaatttcagaatgcgattgcatgtgcgcagagagtatttacattgattgatgaagaaccgcagataccggaaccggaacatgcagttcatctgacggatattgatggaaatgtgaaagtagaggatgtttcattctcttatctgccaggtcagcatctgattgaagattttaatctggaagtaaagccaggacagcgtattgcgattgtcggaccgaccggatgtggaaagacaaccttgatcaatctgctgatgcgtttctatgatgtgaatgcaggaagtattaaagtagaagatatagatattcgcgaaatgacaagaaaaagtctgcgtgcagggtacggaatggtgcttcaggagacctggttaaaaacgggtacaatccgtgaaaatattgctatgggaagaccggatgcaacggaagaagagattgtcgaggcagcgaaagcttctcatatccataattatatccgtcgtctgccaaaaggatatgatacatggatcacagaagatggtggcgggctttcacagggacagaagcagctgctttgtattgcaagagttatgttatgcagaccaccgatgttgattcttgatgaagcaacatcatccatcgatacaagaacggagatcaagattcagcaggcatttgcaaaactgatggaaggaagaacaactttcattgttgcacaccgtctgtcaaccatccgtgaggctgatgtgattctcgtaatgaaagatggaaaaatcattgaacagggaaatcatgaagtactgatgaagaaggaaggtttctatcatcacctgtatgagagccagttttcaatgtaggataaggtatgatgcgagatagtgagatacgttgcaggtcgcatgaaatgtaaatagtaacgaaatgaaaaaggaaggctatcaactacgataacagtataaatcgtagttgatagccttcttcttttcgtttcaataaattatatttatggtagaaggaatgtatacattactataaagtgacagatgcttccgcccattacgaacagatgaaagatttcatggcttccgaaattcttatgcttgctgttgaaaatcgggagcttcagtgcgtagatgacaccgccaacagtatagatgataccaccggctaaaagccatccgaaagcagcagctgacagattatcaaggattgtagaaaatgcaagcacgcaagtccatcccatgccaatgtataaaacggaagatacccatttcggacagaatacccagaaggctttgataaggatgccgacaatcgcgaatgcccatacaatacatagcagtgtgatacctttgcgtccgccgattaccagcaggcagacaggtgtgtagcttccggcgatcagaacggagatcatcatgtgatcgatcttctttaaaaccgtattcactttctcggaaatatcaaatgtgtgataagtggtacttgccgcataaagcaagataaggctggctgcgtaaattgtaagcgatacaatataaagtttgctcggttcacgagctgctctgtatagaagtggtattgcagcgataattgccatgatcattccaataaaatgtgtaattgcgcttccaggttctttgatataaagtcttttttccataaaatctacctccgatacatctatataataacatgtagttttcgatactacatccaagagatatatatactatagcacatatttatgaaaaagcaagagatattttgaaattaaaagtatcttattccacaaaaaaacaggatgaaagaaatctgtgatggaaagtaaaaaacaggccgtgatttcacaaaattaaaatgtgaaatcacggcctgttccaggttatgtttctaataagttcaatctgtcaatctattcgattactgttccggtcttaccattcagagcatcagagactttatcaaaggaagtaatgtaagctttgcggccttcgtgtccttctacgaattcaactgctgcacggaattttggaagcatgttgtaaattccaaaatgtccctcttccatgtaagtttttgcctgatcaacagtaattgtatccagtggttcctcattcggtttgccaaggttgatacatactttctcaacatttgtaagaatgatgagaagatcagcattaattccttctgcaagctttccggctgcgaggtctttctcgataacagcacttgcgccacgtaaatgattatcctgctcaagtaccggaataccgccgccacctgctgcgataacaatctgatctgcatcaagaagagctttcactgcgtcgagttcaacaatcttgaccggattcggagcagagacagcacggcggaaacctttaccaggttcttccactacgaagttgcctttcttacgttcttcattcgcttcctcagcgttcatataacggccgagaacctttgttggtgtgtagaaagcatcatcataaggatctacgatcacctgagtgaggactgtgctgactgtacggtagataccgcggttgagaagctcttcacggattccgttctgaaggtcatatccgatatatccctggctcatggcagtacatacagacattggggatgctgtatattccggatggttctttgcaaattcattcaatgcagtgtggatcataccaacctgcggagcattactgtgtgtgatagcaacctgatagcctgcttcgatcagatcagcgatacatttggcagtgcttttaacggctactttctgttctggaagtgtagttccaagtgcacggtgtcccagtgcaacaacgactctttttttcataatatttccctttcttctaagctgtaatagtttgtcagggggaacaggttcatactgtattagaaaaaatcacaacagtaaaaccaaccttactgataattaagattttactattatttagcagtaaaatcaatattggattatgcctgatagaaggtcaaatacaaaaattgctgtcaaaagaatacaaattgaaattctcatccatttctttaatttcatgaagagactgttccagcgcggagcaaagtaatagaaaaatgcacagccaagaagtgcaaatactgccccatcaccaagatatgcttccccattcatgaaagcaagataagaatgatatttcggaagctcaattccaaaaccaagatcaagaaacagctggatgagataatcaagaactgtatacacaataaagttgataataaacatagtagccggttttttgatatatttctttaacagcaacagtataagcagaccacagattccgtacaacgggagccatggaagcgtacgaagggttacattttccagtgtgccgcaactgagcagttcagaaatgatttccaaaagccatccgaaaatagaaaaggcatggaataaaaatacacaggacagaaagtcataattctgcgccggattgaccggtgattttactgcggcaataggtggttgcacggaaaaaagaaataccggatactgatgcggtgcaaaataagagatctttgtgtaaggaccttcagaatcgtcataaagtgctttactgatcagaagttcatcttcagaaggaacatgctcaagataagaatcattgagctgctcatatttaggagctcttgaaagcacatagtttcttcgtaaaaacagatataaggatgctttacagttcattttgtacgggcggacataaaggatgtccagaattccaagtgtaaagagagataaaagctcccagccgaggaaagaacaatctaacaaaaagagcttccatttatttccccttgtaagctgtttagagagaaaaaaggcattcttttgactgatttttggattctctgcgaggatatatggaatcatgctatattcataatgcttaataattccaccgataattgttaaatcccaaagtttctgaaaaagcgtgtagcagaacatcacccaggaaggatttgccaggtaacgcaacttatataaaaagaatattttagaaatattcgtatcttcatagttataagattcaacaaaaaaacgtttctcaccgacaatcaaaagattgctgataaaaaacttatataaaagagaaagaatgaccccaagtgtaagaaacgaagtgacgataaagtccggacgcttcaggtaattttgaaccgtatgtaaaaaggcagcggctatgaaattatcaggaataaaatcgagaaatgcactgctgaagctttcagcagaaataaaaacaggtaaaataagcgctgtctttgtctgaatcttatcaggaaaataatttaaaaataaagagcgggaaattggatacgaagctgtgagcattgcaatcagaaagcagacagatatactttgccaatagtttgattttattaaaatacgcgcctttttcttgagctcttttcttgaccacataaataatatcccccattgaattgctgctgcggttcacatgcgtgcaatcagcaacgcatcgtttccatagataacatcattataatttagttgcgtacagtttacaagttaaggttcagctcataaagaaatatgttatactgtagttactggtcgcacactgtgtgaacagtaactacagtatagttgttgggttcaagcggataaaagttgcaggttaagcaattgtgtacctgcatcagacataaagaaagtggaaagaaaagagaagtacgatgaacagacaaagcacattatgttatattgaaaaagacggaaaatatctgatgcttcacagagtagtgaagaaaaatgatgtgaataaagataaatggatcggcgtcggcggacattttgaatatgcagagagtccggaggaatgccttctgcgtgaagtgaaggaggagaccggttatacattgacttcttggaaatacagaggaatcgtgacatttgtatatggagaagatgtagtggaatatatgtcactgtatacagcagacggatttacaggtaatccaatcgaatgtgacgaggggattcttgaatgggtggagaaagaaaagataaaagacctgaatctatgggagggagacaaaattttcttccgtctgatggacgaagaagaggaatttttctctttaaagcttgtgtataataaatctgatgtgcttgagtatgtggcactcaacggaaagccgatggaactttttgatgtgattgatgaagatggaaataaaaccggacaggtgaaagaacgcggtgttgcacatagagatggaacattgcattcaacggtacacatctggattgtacgtccgaatcgggagagtggttatgatatactccttcagaaacgaagtgaatgtaaagattcgaacccgggagcgtatgacatttcttccgcagggcatgtcagtgccggggatgaactgatggaaagtgcattgcgtgagatgaaagaagaacttggaattcatgcaagagaagatcagcttcagtttatcggaacacacagaggacagtttgaagctgaatttcatggaaaaccattccgtgacaatgaacgcagtaccgtatacctttatagagaaccagtggacattaaaaatttgaaattacaggaatctgaagtggaagaagtgatctggatggatttcgaagaatgcaggaagggtattgtggagggtaccctgccgaactgcatttatgaaggagagttccagatggtaggaaaagcactcgggatagagtgaaaagtagaataagatgatagaatctgaaaaagagttgaaaccatttgcctgaatcagctagaatgatccaggcagaagtttcaactcttttttaaagactgacatatattttcagtgtggtttcagcttatgcttcttcggacagtttcttcacaatctcagggaatttcataaagtgggaagctttgaccagaatcgtatcattttcattgagaatctgtcccatgttctggtaaaagtcttcttttgtgtcaaaatggaaaactttcatgttcttctctgttgcaagaacagtttcctttgcagcttctgccatatctttggaaagtgctccgatgcagaccaaaacatcagtgtttttaaatgctgcatatgctccgacttcgcggtgcatcgcaagctcatctgcaccaagttcccccatatcgccaagaatagcgacctttcttgtatctgcatatgcaagtacgtcaagagaggacttcatagatgccggattggcattgtagcagtcatcaatgatcgtgtaatgctttgcttcaatcaggttattacgtccggcaatcggaacgagcttttcaattccgcgtgcaatctcatcattattcatgccaagcgcatatccgacagcaactccggctaaagcgttataaatcatatgatctcccgggattgagatatgtgcatggaaacgtgatgtcggtgtaacaaattctgcgtatgttccttttaatcctttacgctcaatattttccacatggaacggacaggaagctgtaagaccgaaataaaccggagttcttccatcacgggaagtgtagctttttagcttatcatcatccccgttgaagataacagaacctttcggattcatgtagtctgtcatggaactcttttcctttaggattccgtctcttgttccaagattctcaagatgtgcatatccgatattagtgatcacgcacacatccgggcgggcaatcttagccagtggtttcatatctccaaagtggctgattcccatctcaagaactgcaacctcatgttcctcacggatattgaatacggtcagaggaagtccaatctcattgttgaagtttccttctgttttcagtacattatatttctcggaaagtacagatgcgatcatttcttttgtgcttgtctttccaacacttccagtgatacctacaactttgatatcgagggaacggcgatagtgttcagctaagtctttcaatgcttctgtgcaggatgaaacgcggatataaggataatcaacgtcaccaagatcctgctcagagagggaacagagtgcacctgcttccatgacctgcgggataaaactgtgtccgtcaacacgggcacctttgatcgcaacgaaaagagtatcttttactactttacggctgtcgatcgcaacacttgagacctcacagtctaagaatgcaggatcaccgcaataaattccgcagcaggcatctgcaatttcagataatgtcatatgtttcattaatatcttgcctccatggacttcttaatgatcagttcgcaaagatcgccgtattcgattccataaaccttggcttccttcggaagaaggcttgcggaagtcattccaggaagggtattcatctccaggcagaacagattaccctctgcgtcaagcaggaagtctgcacggctgtaaacattgagcttcagagcattaaatgcttttacagtgagttccttcatgcgttctgcaacttcttccggaatatcagccgggcatacctcagaagtggctccatcctgatatttattcgcataatcaaagaatcctgtcttcgggatgatctcgattggcggaagtgctgttccgtcaatgataccgcatgcaaactcacgtcctttgatgtatggctcaacaacaagttcatcttcgtaatggaaagatttcttcagagcctctgcatattcttcatctgtatttacaatatatactccgatactggaaccaccggagcaaggtttaacaacaacaggaagtgtcagaccgagtgactggtaagactgatcttcagagttcttataaatcgttccacctcccggagtgtctacgccagactcaaggaaaatctgctttgcaacacctttgtgcattgcaaccgcacatccaagagagtcaggtcctgtatatttaataccaagcagatcgaaagatgcctgaagctttccgttctctccttctccaccgtgaagaccgaggaaagtaatgtcagccagacggcaaagttcaattacattcgggccgaagaagcagtctgactgatccggacgggaagccttaacagcttcaagatccggttcctccgtgctgatattcttcacaatctcaagcccgtgatccggaagagtaaagacatcctccaaattctccggcgcattctctaatcccatgaatacatccagaaggaatgcatcatgccctttttcaactaatgtacgacagattccggcagcagaagaaagtgatacgtcacgttctgtgcttaagcctcctgctaatacaatgattttcataattttatactccttaaaaatttaatccaactatacttttacgattatagcacatgttggcagaaagtaaaacaggaggaataaagatttaatggagggattctttctccccttgcgatattatttttgatagattcaatgtattaaatcccattgacaattcacagaaaatactactattattatatatataaacagtttttaattgtgcaaatcaatattttattgttaaaagagaggtaattccactggaaatcataaaaaatcaaattaaattttttattgaaaggggaaattatatgaaaaaggttatatgtttattttccgcatttttattacttttatcatctgccatgacaacatatgtacacgaaacagactctcaagattacctatcaattccaagttataacgaaacatactctgcacacccaacggataataattttttgtcactaaaagaatataatacagaatactccaatggagagaatcctctaaaaacaaattctcaagattacctatcaattccaagttataacaaaacatactctgcacaaccaacagatgataattttttgtcactaaaagaatataatgcagaatactccaatggagagaatcctctaaaaatagattctcctttaaccactcaaaatgtccctgatatatgctatttcccctatccgaaaacaaaaaccattattttaggacaataagcgggaatcctcggcaattcaattaccgagatgaaagcgcaagattgcgcaggggtatatttttacccctgctaaaatcaagttgtacggttatttaatcttcccagccagataaagcagcaccgcatcctgaaatttcctcggattcagtgaacatttcttttgaatcgcattcaatttatactgcaatgtatttttatggagaaagagtcgttcacttgtggcggcaagggacatttcttcagaaaaataaacttccagcaggtgcagttcttgttcattgagcggggcgattgtcttggctaaaaattctttctgattttctggtgtgatcgtagaaagaatcagttcaagtgtcaaatcatcaaaaataacatagtgttcagatgaaattataaggctgtgcaaagcagtttcagcagattgataggaggtatggagctggaagagtgatgtcggttttccaactgcaatatctaaaatatcgaaatgttcttttgcaaagagtttaaaaatataattctgtttttcaaaatcagtttcttcgatcaaagcaataaaatcccccggataattaaatgtgtgaagacagacatgtgcctgtgcaaacatttgttgaattttctgttctaaaatagagcggtttgtaattggattttgcttatttgtgcgaataagaacaattcttttctttgtgttgagatcaatcttaaattcatgtagacaggaggtgaggtattcctgattgtcagtttcgtttctgatcaaagattgaatgacaaaatgttttttatcggcctgtctgcggctgtactgatttagttcctgctcccggatcagaagattggtgatgcgttctgcgagataggcataactgcggactttatcaggtataccggtgattccgatgacggccagcagatgttcattatgataaagtggaagattgattccctgttttgtgccggaaaaattgttgtcttctgttacttccagtgcagaaccggaagcagcggcctgttgtccaatctcgtgaaaggttccgacacgggatgagtctgtgctggcgagaatgataccagatggagcaataaagttgatgtcatgatcacagacatctttgattgtatttacgatttgttctgcgagttcgcggtcaattttagttatcatagaatttttattatatcctttcttttgacataactgtttagagccaaccttcaaaatgctacgcatttcgtcggtgtggcgtatccgccaaataaaatttcaaaaacagtcttaaaaatgcaagcattttacatctgttttatgaaattttgcttggctctgaacagttaccattttactataaaatgttatatataacaaataataatagaataaatttgaaataatgttacatataacatatttgagaaacaagaaatttggtatcctaatattaataaaacacggaacagacatggaaaggagttcattatgaaaatagtaacagcgattgattcatttaaaggaagtatgacttctatggaagcaggacaggcagcggcagagggaatccaaagagtggatgtggatgcagaagtgattgtaagaccgttagctgacggaggggaaggtacagtagaggctcttgtatccggaatgaatggaacattacagaaagtacaggtgacaggaccacttggcaaaccggtgatctgtgagtatggtatcattgaaagcacaaaaacagctgtgatcgagatggcgggggcagcaggaattacattggtttctgatgaagagagaaatccgctgaatacaacaacatatggcgtgggagaagtaattcgtgatgcgattgataagggatgcagacgttttctcgtcggaatcggcggaagtgcgacaaatgacgggggagtcgggatgcttcaagcattaggttacggttttcttgacaaagacggaaatcaggttccatttggtgcaaagggtttgaaggttttggaggaaatcacagatacttatgtgcttccggaattaaaagagtgtaagtttaagattgcatgtgatgtaacaaatgctctttgcggagaacagggatgcagtgcagtatttggtcctcagaaaggtgcaacaccggagatgatctgtcagatggatcagtggctaggatattatgcagcattggcgaaagaaaaattcccaaaggcagatgcaaagcaggaaggaacaggagcagcaggaggccttggattcgcatttctcacatttacaaatgccgtgttggaatcaggaattaaaatcgtgctggaagagacacagttagaagagtatgtaaaggatgcagaccttgtcatcacgggggaaggccggatggatggtcagacagcgatgggaaaagctccggttggagtggctgcactcgcaaagaaatacggcaagccggtacttgcatttgcaggcgcagtcgaaagagatgccagaaaatgtaatgaacatggcattgatgcatttttccctatcctgcgtggtgtggttacgctggaagaggcaatgaagaatgaaaatgcaaagagaaacctggcagatactgcggaacaggtgtacagaacatttacaattctttgatcatacaatattgttttaactgaaaatgaggtttctccacgattccgaatatcttgaatccaagatgctcataaaatggtacgtttttcggattgtgtgtctcaagagagatcatcatatcattgcgatcggcgcaggcaatgacttcattcatcatcatttctgcgagaccgtgatgctggaatttcggatcaacggcgaggtagatgacatgaagtcttcgggtttcatgaagctgggcggtccaagtggagttgaggtaatcttttccgaggacaaagttgaaaaatgtcttcatagtcggatcctcgtggagtagccagccgtctgtgatgaggctttctttcaggctgacaaaataattataaaatgcatgacggtgatcggattcgtcagaaaggatcaggactcccttcaactcagggctgtcagcaaagacttcacaggtttcaaataattcagttacgtcgcactcaagaagatgtggcagcagacgttcttttgttgcttcatcttcgatcagagtgctgtagagcgggtcgttctgaaagcagacggtcagtatttctttaaggcggtcaagatcctggtcctgtactttgtagagcttatcgctattcattggttttctccattcttttctttattataatgtgatgatgtttcaaggcaatcgtttattaaagcctggattttatcaacagattgtttcatataatgtaaatcatcttttaagtaggcctgctggcggcggatagcggcttcaagtcttctgatctcaacatcaagagaacctgggattgccatctgatccagttctttcagacgctggacaaggccatagagattctcatggtgaagaatgcgtccggcgccccacatcagacggtcttttggttgatgtaaaatatattccgtaaagtgataatagacttcttcatcgaataaaaatgcgtagcagttattatcaacttcatagagtacctccagtgcggcggtgatgttctggctttccagtgcatggactgcctgctccaggtgacagaggttctgactggcagcagcatgagggaagcagactgcgtcctgccagtcgaggcggacgaagtagtcctgcatcttccggaaaatgtgcagcagtttagaagaaagtccggacaccattgggaagtcagcggaaacagtatggttgttgatctcctgaatcttttcatataataaatcggcagattcacatacctttgaaatactttccagaagcgctggaatttcttccaatacttctgccggggcattggactgtgctgcaagacagtcggcgacggaacttttcattgccagaaaatgtctggaaaagtcaagtggcggaagtgtcagctgatccagtgtaactaaaagtcttgtatagagctcatggtggaaacggtaaactgcttcctgatagaactcttcattgtcatattgggagtggtaatgcgtttccataaacgatcctgcgctgaaatcatttacggtagatggaataccggagatggcgatggaaaaatcatccgaccatgtctcgattggtgcaagtactgtcagtccatcagggtaagcctccttcggaacagttatattttcacaaaaatgtttcagaaaatcagcagactcataagtagagcggattgcatcctgtgtgttatgggcgtgagccggaagttcaaagttgagatcagcgatcacgcggccctgccactccgggtgaacacggaatacctggttccaggctccggttgaccagtcgaatttagaatcacagacaccccactcttcggcagcaagggcacatactgcgatggtatagcgcggttgatagccactgtcaatcagagcctttatgattccgaatgtcatagagaccgcacaattgtcatcctgaaatccgtcaaaataggaatcgtagtgtgcggaaagcagaatcatccggtcgtccccttcagaagcggcagttcccggaagatatccggtaatgttataagccgggcggttacgttcaacccaggaagaggcgttgagttcaactgcgacagaggacggatgagatactgcaggatcttcgggacagagaagttcttttaaataagaagcatcctgtctcgaaagagagaatgcaggggcatattccggtccggcgatatcctgagcattgagtgcccgcggatcaatctcagcataaccctgtgtctggacagcaatcagtccgacagcacctttcaaatatgcctgatagacagggtagttgatccaccattcatcacgctggttgatatcagcaagaacgagctttccacggacattgagcccttcatagtccgatgcggttccacgaccgacatagacaagatcataagtctcgaatccatctgtctcaaaattcgtctgataagcacccatctgacaagtatgcagttctccatgttgatcctggaaacggagcacagcacgttcaaaggtccaggaatccagccaaaattcatccttcgtcacattctgaagtccgatgcgtttcatttcttcatataaaaaatcccctgtcctatgttccgcatcagaaccggcagttcggaaaccgagtaccggattggttttgtgagtctccatctgctttgccagctgataagagtaagtaatgtctagatgtgaaatgcattcgttgattctgttttctgtctttgattccatttatatcacctctgaaagtctgagcctgttgtatgtgtttgagtttctgcgcttattttagcactgtgtggtaagtgtgacaagagtggaactttacaaatatgaagagagtggacagcagaaattagttttgctgtccactctttttatgctattataggaaagaaatgacagttacaaccattttataataggaaaggataatgataatgaatcagaaaatcattcttgcatcagcatctccgcgcagacgagagctgcttgcgcaaatcggtttagaatttgaggtaaaggtaagtaataaagaggaagtctatacaagtacaaaaccacagaagattgtagaagaacttgcattgatgaaagcagaaaatgttgcatctgatcttcaggcagagggagtagaattgaaaaatacaattgtgatcggagcagatacaatcgttgtacgtgacgaagaaatccttggcaagccaaagaatgaagatcatgcatatgagattcttctaagccttcagggaagagcacatgaagtctatacaggtgttgcaattctttcctataataatgcatgcgagaaagaaatcattaaccatgcggtagagacaaaggttcatgtgcatgagatgagcgaagaagaaatccgcgcgtatatcgcaaccggagatccgatggataaggcgggagcttatggaatccagggaagctttgcggcgtatatagatggaatcgaaggggactactataatgtggttggactgccggtatcatatgtttaccagcaattgaaaaaacgctaaacatatattgttacatttgtaattatatagtataatacatatgttgtcgctcctaatctggcaacagaaagggggtgtgaatatgtcgatatttatctcttttcttgtttccgtcgcagcaagtgtagttggctactatgtttgcaaatggctagacggagatgacagcgacaattagcctgaatggatgctcaaccatcaaaaaagagaagacccctcatgagttggcggctcatgaggggtcatttttgtgtgaatatgtcatattcatctcttttcttagctgcaatcactatatcacataatcgtagctaaaacaagtatatgttgaaaaataaaattttatttatcacacctatactatggtttaaaaatgggtgcttttcttttgagaaaacaaaatcgtaacaaaaatgtaacatctgtttttgctattattctgaaaaggatacgaaaaacaggagaaaaattatcattaatatacaaattaagacgaagtgtctatgaaattttttttgaatcgtacaaatgtacagaaataaaaacaattttattgtggaaaatgcgcataaaaaaagagcggattctaaaacaagagcgaaaaacggttaaaaaagtaataaaaaatagacaaaacgtagaataaaaaaagagcaaattgaaataaaaaaagtgttttttttatgaatttaacttgttgaagtggaacgttgacaaagagaaaacatgggagtaatatttagtcaacttttcggagaacatgacgttttaatgcgattataagcagtaacatttgccatgctgtatacgaaaagtgacaaaatacagcaatatacattaggtagaaagggagggagcaatacgggaaatctggcagacaatcttatggaagaactgaattgtgagaaagtgttcacacttccggttcttggcgggatcaatgaatctgtagtagttacctggatcatcatggcagtgcttgtgatagcatccattattctggtaagaaacttaaaggttgagaatcccggaaaagtgcagttggctctcgaagccggtatcggcgccgctgaggacttctttgtcggagtacttgggaaagagaacaagggctatgtaccgtatctgattacggttctgttatatctcgcctgttcaaacacaattgcaccattgtttggctttaagcctccgacgaaagatctgaacgtgacggcagccctggcaatcatgagtatgtgtctcattgaattctcaggtatccgcaagaatggattcggacactgggcaaagcattttgcacagccgattccaattgtagcaccgatcatgattttggaaatcgtcatccggccgttgtcgctttgtatgcgactctttggtaacatgctggcaggattcgtagtcatggaacttttgaaagcaatcgttccactgatcattccgattccaatcagtttttactttgatattttcgacggcctacttcaggcatacgtatttgtattcctgacatctctgtttatgaatgaagagatggagtaagaacttaacacattctattgaaaagaaaaggagattaaaattatgtcaacacttattgctattggagcagctatcgcagtattcacaggtatcggagcaggtatcggtatcggacatgcaacaggtaaagcagtagaagctatcgcaagacagccagaggcagaaagcaagatcagtaagaaccttatccttggatgtgctcttgcagaggcaacagctatctacggtttcatcattggtatcctgatcatcttcttcctgaaataagaaacgaaaagaatcttatgaaaatgatggaagcagataacaggaaaggcaggtgtaaaaggtgcttcagttaaatatgaaccttgtctataccattatcaaccttattgttctcttcctcctgttgagacattttctgatcaaaccggtgagtgatatcatggagaagcgcagacagatgatcgcagatggtcttcagggtgcacaggatgcacagagtgatgcgcagaagatgaaacaggaatatgaagatgctttaaagggagcaaagcttgaatcagcagcgattgttgagaaggcacgctcagaggctaagacagagtatgaccgcatcgtaagtgaagcaggaagcaaggccggagatcttctggaagctgcaaaagagaatgtacgtattgagcgcgagaagacaatgaaagatcttcagactcagattgcaggactggctatggcatccgctgagaagatcgtgggagacaaagagcagaacatttatgaccagtttttgggagaagtaggtgggacagatgaaaacacagacaagtaagagtcagatttactgcccaatggcagcaatcagatatgcacgtgtcctgtatgaagtaggtgtcccaaaagaagctgtacagaaaacacgtgagatttttgaggaagtaccgcagcttcacgagattttcgcgaatcctaccattgaacttcagaaaaaaatgaatgtggtagatagagtatttccaaaggagataaaaaatttccttaaagtagcgtgcagatatcagagaatggatctgatcgaagatatcttcacagcatatgacagatactgtgatgaacagaatcaggttctgaacgcagttctgacatgtattcagcctccgacggaggaacagaaaaaaggaatggaggcgttcctttgcaagaaatatggcgcaaatcgtgctaaaatcgaagttcgccaggacaaagcactgcttggaggatttattctccgggttggcagtgatgagtatgactggagtatgaaagggcgcctgaacagattagaacaaagattgacctggaggtgaacaaggtgagttcaatcaattcagatgaaattatttctatcctgaaagaagaaatagagaattttgatacaatgagtaaggacagtgaagtaggtactgttgttactgtcggcgatggtatcgccacaatctacgggattgatcacgccatgtacggggaaatcgttacttttgaaaacggccttaagggaatggtacaggatattcgtaagaatgagatcggatgtatccttcttggaagtgacacaggaatccgtgaaggcacaaaggtagcccgtacaggaaagaaagcaggcgttccggttggagacgcttatgtaggaagagttgtcaacgcccttggtgaggcgattgacggaaaaggtgagatcaaatctgacgactatcgtccaatcgagaatgaggcacctggaattgttgatcgtaagtcagtaagcgttccgcttgagacaggtatcctttccatcgatgcaatgttcccaatcggccgtggacagcgtgagctgatcatcggagaccgtcagacaggaaagacatccattgcactggatacaatcctgaatcagaaaggcaaagatgtgatctgtgtttatgttgcaatcggacagaaagcatctacagtagccaaagttgttaacacattacagacacacggagcaatggattatacgattatcgtatcttccacagcaagtgactgtgctccgcttcagtatattgcaccatatgcaggaactgctatggcagagtactttatgcacaagggaaaagatgcactgatcatttatgatgatctttccaagcatgcggttgcataccgtgcactttctcttctgcttggacgttctccgggacgtgaggcatatcctggagacgtattctacctgcattcaagacttctggagagatccagccgtttgagtgatgagatgggcggaggttctatcacagcacttccaatcattgaaacacaggcaggagatgtatcagcatatattccgacgaatgttatttccattacagatggacagatcttcctggagagtggacttttcgcatcaggaatgagaccggcggtcaacgttggactttccgtatcccgtgttggtggtgcagctcagacaaaagcaatgaagaaagcatcaggaagtattcgtatcgatctggcgcagtatcgtgagatggaagtcttcacacagttcagttcagatcttgatgcagctacgaaggaagaactggaatatggaagtggtctgatggaacttctgaaacagccactgtatcatccactttccttgcatgagaaagtaattacactgtgtgcagcaacacataaagtactcttaggtgttgagaagacaaaaatcaaacagttccagtatgatatgcttcagatgttcgagacagagcatccggaaatcggtcaggaaatcgaagagaagaaagtcctgacagaggaactgatcgacaagatcgtagagacagcgaaggaattcaagaagagcaggtgttaatatggcaaatatcagagagatacagagcagaatcaacagtgtcaaagacacaatgaagattaccaatgcaatgtatatgatctcttcttccaaactgacacaggcgagaaagaagctggcagatacagaaccatatttctatgcgctgcagggtgagatcagtcgtattttacgtcatctaccagaattacatcatagttatttcaacaagagggaaaacattccggcagaggaacgtaagattggatcgatcgttatcacggcggacaagggactggccggtgcatacaatcacaatattgtgaagcttgaggaagagattctttccaagccgggtcagcataagctttttgttgtgggagagcttggacgtcattatttcgcaaagaaggatgtagatattgatacaaacttccgttacacagttcagaagccgaccatgcatcgtgcccgtgacatttcagcggttattctggatcagtttaacaatcatgagctggatgaagtttacgtagtatatacacgaatggaaaatgcagttcagtcagaggcagaagtgttaaaacttcttccactcgagagaggggactttggcgaaatgacgatgcctttgaatatgtatcgcgaggaaatcgaactaaatccatctcctatggatgtcatgaacagtattgtaccaagttatatcaacggtatgatctacggatgtctggttgaggcttatgccagtgagcataatgcccgtatgatggcaatgaagtcagcaacagacagtgcacaggatctgatcaaagatctgtcaatcctctataacagagcaagacaggctgcgatcacacaggagatcacagaggtttgtgccggcgcaagagctcagcagaagaagagttaaaatgtcgagatgcgttacagacagcaggttgttgcagtttgtaatgactgaaatatagaaagagagagagaacatgaataaaggacgaattgtacaggttatgggacctgtcgttgacgtagtgtttgaaaacggtgatcttccttttatcaaagatgctcttgaagttgataataatggaaagaaatgcatcatggaggttgcacagcaccttggaaataatgaggtgcgctgcctgatgcttgctgcaagtgaaggactttgcaaagatatggaagttactgcaacaggagccggtattcaggttcctgtcggcgagcagacacttggaagattatttaatgtactcggcgagacaattgataacgaagagccgattacagattctaaaaaatgggtaatccacagacagccgcctacattcgaggatcagagcccggtagtagagatccttgagacaggtattaaagttatcgaccttcttgctccttatgcaaaaggtggtaagattggtctgttcggtggtgccggtgtaggtaagaccgtgctgattcaggaattgatccgtaacattgcaacagagcatggcggatattccatttttacaggagttggagagcgttcccgtgagggtaacgacctctggacagagatgaaagaatccggagtactggagaaaacggccctggtattcggacagatgaatgagccacctggagctcgtatgcgtgtcgctgagacaggacttacaatggcagaatatttccgtgatgagcagcatcagaacgtgcttctctttatcgataatattttccgttttacacaggctggatctgaggtatcagctcttcttggacgtatgccttcagccgtaggttatcagccgacactggcaacagaaatgggtgaacttcaggagcgtatcgcatctacaaagaacggttctgtaacatcggttcaggcagtatatgtaccggccgacgacctgacagacccggctccggcaacaacatttgcccacctggatgcaacaaccgtactttccagaaagatcgttgagcagggtatttatccggccgtagatccgctggagtcaagttcccgtatcctggaagcagacgttgtaggagaagaacattacgaagtagccaacaaggtgatcgcaattcttcagaaatataaagaactgcaggatatcattgcaatccttggtatggaagagctttcagatgaggataaagcaactgttatgcgtgcaagaaagattcagaaattcctgtcccagccattcttcgtagcagagacatttacaggaattcctggaaaatatgtaccattaaaagagacaatccgtggatttaagatgatcatcgatggagagatggatgcttatccggaaaacgctttcttcaatgtcggaacaattgatgatgtaattgccaaggcaaaagagatggaagaagagtaattgttgaaataggagaatgtgcatatggatacatttggtctgaaaatcatagcaagtgatggtgtattctacgaaggtcgttgtaagaagctgatcattccggctccggatggagaaaagggaattcttgcaaatcatgagaatatggtaatcgctgtgaatgtcggagttgcacatatgagtctggacggcgaagattggaaagacattgcagtgggcgtgggatttgttgaaatcgtaaacaaccgagttacactgattgttgatacagccgagaaaccagaagacatcgatgtgcgacgagcacaggagcagaaagagcgtgcagaggaaaggttacgtcagcagcagagtatccagcagtattatcatacgcaggcatctctggcaagagcgatgaaccgacttcgtgtttcacaggataaaaagtggaatttatagatttctagagcatgtagatgtgcagagatcagaagtacctgcaggatatatcatttaattatagaagagggacagattttccggaatggaaaatccccctcttttttacatttaaaagtgaactgcgaaacttttttgtattgcattttaattcgtagtataatacaataatcttatctgagtgtctaaaattatagaaagacagaggaaaaacgatatgagtgatagaaaaaagccacgatctctttcagaaatcgtaaatgatgtacttcgtgcggtacgtgattattatgattcagaatacgtgtactatattgagaaagagtatggggatattgagaccatctttgagtggtgtgcagagaatgttccatggcagagagataagataaagatgcttccggaagaacagcagccaaagtggatgaagcaggagattacaaattcaacagaggccgattacagtgtgagtttgcagctggatgagaatacagtagcaattcttgcagcagttggagttcaccggggcggatgtgatgttggattgcttcgtacggtgattccgtatataccgcaggcaatcactcttcataaactccagaaacaacaggagtatctcagttatcatgataatctgacaggagtacttaacagaaatagttttgttgcatatctggatcatgtggaaccggaagaattgaagacattgggagctctttctgtagacattaatggactgaagaattttaataaagaatttggcagagattatggagatgaagttgtcaccagagttggtgaagtgctttcggagtatttccataatggtaatgtatacagaatgacaggagatgagtatctggttcttgtagagaacgcttcatatgaagatttcacacaacaggtacatagtgcatatacaaagcttgagaacataagtctgggactggtttcagtagggtatgcctggggaaaagtagacatagatgtgaatggtcttgtgatcagtgcagagaatatgatgcgggaagagaaaaagaagtattataaaaatctgcgtaaaggccatcatgagccaatcatcaaaaaggatcttctggaggatattgaacagaagaattttattgtatgtctggtaccgaagattgatgtgcagaccggagaaattgcaggtgctgaagcgattgtcagatatcatcataaggatcttggaattatggatccgggaagatatattaatctgctggaagagacaaggttgtcacattatctcgatctctatatatttgaacaggtatgtcagatccttcataagtgggagacagaaggaatccagatggtgccgatttcagtaaactttgcaggtgaaacattgaggcaggagaacattgcggatcagatgagtgcgctgattgagaaatatcaggtattatgcgaatatttggaagtagaagtatccgaatcttatacagatacgaatcaggagatgctggcggcatcatgcagtaagatcagaaaagcgaatgttcgcgtagtattggatcatttcggagctaagaattccagcttttcgattctgtccattatggattttgatggattgaagctggatgagagcctgattacaaatctggttggaaacagaagaagcagagtggtagcaaaggccgtaattgatatttgtcatcaattgggatgttctgttcttgcggagagtgttgaaacacaggatcagctgaatgttcttcaggaattaggatgcgattatgcacagggaacattatttaataaaccgatcaaagtggagacatttgaagtgcgatatctgaaggaataggatgatctgccggggggatgaaacggaaaagattctaaatattacagaggataagatgaaaaatacagatggagttgaaattaaataagatgaataaagtattgttcagagacagagcaaagaaactaatgcttacaggtgctttggcaggagtaattgcaggagtggcaattacttcaggaatctcctcaattacattgaaaaaagctgaaaagaagttggaaatcagcaatgcaaaattacaggagcagacaaaggagaacgaagaactgcaggcagagttagacagagaagaagtaacagaaaatactgcagagttgctggcaagtgatgatgaccggtggtgtcttgcacttgtgaatgagaagcatccattggatacttcttatgtgccggcgaagctgacggagataagtggtggaaaacaggtagattccaggatggcagacagtctgaataagatgctggatgatgcgaagaaggcaggactcagcatgtatgtgacatcaggatatcgttcttatgagaagcagagagatgtctttaatacgacgatgcaggactggatcaatcagggatatacaccgttaaatgcgtatgatgagacaaaaaaatcagttgcaattccaggaacaagcgagcatgcaactggtcttgcggttgacattatgtcgacaaagtacggggagcttgatgagaaacagggagatacagaagagcaaaagtggttgatggaacattgttcagagtatggttttgttcttcggtttccgcaggataaatctgatattacaggaattgtatatgagccgtggcattatcgttatgtgggagtagatgctgcaaaagagatgacagagaatggacttactttggaagaatatgattctgcaaattaagtgaaaaactgttctgatcgacagataagagagaagtataaataatacataaggaggagaagtaaatggaagatttaacatttggagaacaggtgaaaatcgtcctgggaagaaaaggaatgacgatcaaagaactggcggagacgattgagaaagagacaggaaagaagatgtcccgccagaatttaacacagcgtcttggaagggataattttcaggaacaggatatgagattgatcgcatctattttgggctgtccgtttcagctgagtatcatgtcaggagagattacagagagcgcagccggacgtatcaggaagcaggaagtaaaatggaatgaacaggaacagccggaagagagcttttcagaggaaacggtggagacagagaaggaagaacagcagcttacaggtgaagaacgtgacatgacgatcggtgagatttatgatatgcatgaagaacttgctgaacttgaaaagaatgcagtagaagcagagccaactgaagatgtcagagaagatcttcagacagaagaggaatataaggaagagcttcaggaagtgccggaatcagatcaggaagaagaaaactctgcggaaccagaagtttcttatacagaagattatgatcagccggcagaggaagaagcagaaccatatgaagaagcagaagttacatcttatgagacacagcaggcagagccggtgcaggaagaggcaacatacgaagagcctgtacaggaagaggttggagacattaatccatacacaggaagagaatatgaatccaacagcgtacgtatgcatccgaaaagaattggatatgtgcaggtttatgaccgtgcaaatcataaatggacagatatgacagaatgggcattcctcggatatcaggaacgcaagaaagtacttcttggagaggattacgaaccgccaatttatctggattaaaattgatagagaaaagaagtgcatccgctgtgaacgcttcctttctctatctttttcctttctttttaagaatcacattaagtatcgacaccagtgaccgaaagattcagagttttcacattcatcttcggtaagtttcagaatagagatgtaagaactggtaaattgaggaaagccgaacaagttagccatatgtgcttctctgggatcgtaaagaccgggaacgccaagccaaagatgatccttttctttgatcaggagaaggtgatgataattatgacagccatgcagaagaaaactattgttggcaagtggccagaatctgcgcggaagtgtggaaatctctgcgtgtgtgatttttctggcttgaattgaagcgtcctgaattgcagtctcctcagttggtgtcacctcagttggtacctcttcagttgaagcagcatcaatagaagcgtcagataatgctgcttcggatacagtctcagatacagtgtcttctgttatgagggattcttccgaaagggatggattctcaggttcagaggataaactctcttctgttgataaagagcaatcagaaaaagaataaaaatccggcagaggtacagcggaggcaatccaatgctgtgatcgattctgggtgatggagaaaataatgaacccatcaatgtgtttaagagttcttttatgtggaaaacgttccccggaaatgaccagttgtgtggataagttctgaccagagcactgaagaagtgcaaccggagaacctataagtgtttgattttcgagaataaatgcatggacttccaactgttctccagggacaatcggaagatttttaacatgaagtgttaagagataagaataattatgtgatgaaatttgtagaaaaccaagatttctgcggcggcagcaggattcgtactcatataaataataacttcccggattcatagcaagcccctgaaaagaatttttctatatagtttattcagaatgaaaaggaatattaatgctatttttatacaataaccgaaaggaaacaaaatgaggatgacaacggatgaaaaatatatgcgtgcggccttaaaacaggcagagaaagcgtataatctgggagaaaccccgattggttgcgtgatcgttcatgaagataagattattgcacgcggttataaccgacggaatacagacaagaatccactggcacatgctgaggtcgcagcaatcaagaaagcaagcaaaaagcttggtgactggcgtctggaagaatgtacattgtatgtgacattagagccatgtcagatgtgtgcaggtgcaattgtccagtcccgtataccaagagtggttgtcgggtgtatgaatccgaaagcaggatgtacaggttccattctgaatctactggatatccaggcatttaatcatcaggcagatcttacaacaggtgtattggaagaagaatgcagccagttgatgaagcagtttttcagagaactcagggaagccaggaagatgaagaaaaaagcagaagcacagagtctgtaacacagaggtataaaatcatgtggaatcttgtgcaaaagaaagagcagcatacttgacaagcatttatttatcatgtaaaataataatccgtgcagccggggtggtagcggtaccttgaacctgcaatccgctatagcaggggtgatattgcgcagagggcgacagtctgcagggctgcccccggaaagtgacgttgacgtctgggtctcacgcgacgggactctgtgaaccgtgtcaggtcgggaacggagcagcactaagcagaacctctcgggtgccgtgagggtgcctgggctgagttaactaccggggtaacgcttgtgggccaagttcgaagcgcaatgcacgtaaaaaatgaatagaatggtatttatattggaaacgatacattccctccggaatgatgaacgaacaacacaatctgttacgcttatcatgataggaggattttttatgccaaaaaataagtttcaagaagtaattttcacaatcatgatggtttttgtcatggtttatgcaatgatctgctacaacatctctctgaatatgggaggaatgagtaatgaggtctttctggcagcattccatgaacttatcatcatgggaccgattgctttcattctggatttctttctcgtaggaccgattgcaaagaagaaagcatttatgatcgtaaatccacagaaagataatccgtttatgatcgtgctggcgatatccgttttatccatcattggaatgtgcccgctgatgagccttgcagcaacactgctctttaaggatgcaggaaatcagatgattgctgtgtggttccagacaacagtattcaatttcccaatggcattcttctggcaactgtgcttcgcaggaccgattgtcagaaaagtatttggggttattttccgtgaggagcagaaagaagaggtggcttttgattaaagctgcaaaataagggaaagctatcatacgataatctgacacaatttgtgtcgttatcgtaagtgatagctttccctttactgttcactcccgtgtcaatcactccgctgattgacacggaggatgcatgttttgacttgaatgcatctcgccccatcgccaaaggcgatttaaaatggcgagatgcgttgctggtcgcacatcgtgtgaacagtaacagatttccctttttatgttatatacaatgttatatacacaacttcacatatcttgacatttctcacatcttcattcagaatagaaaggtaagacctaaaaaggaaaatgtttacaaatatacattattgacaggaaaagaggtttataaaaagatgaagattttgcttgcagcggtgaatgcaaagtacatccactcaaatcttgcggtctattgcctgcgcgcatatgcaaaagagcagcatccggctagcaatattacaatttctgaatatacgatcaatcagccatttgatgagattttgatggatatttataagcaggcaccagatgttctctgcctttcctgttatttatggaatgtgacagaagtaggacaattgatacaggagattccaaagattctgccggatacgaagatctggcttggaggtccggaagtttcttataatgcaagagaagttctggagaaatatccgatggcagaaggtatcatgcgcggagagggtgaagagacttttgcagaacttgtggcatattatgaaggccgtggtgcagctgagttgatcaatattcagggaatcacatttcgggaaaaggaaaaacagattgctgcgacaccgtttcgacagatcatggatctgagcaaagtaccgtttgtctatggggatattgagaatttcaagaaccgtatcatttattatgagacgagcagaggatgtccgttttcttgtagttattgtctttcttcaattgataaatgtcttcgattccgtaacctggagcttgtgaagaaagaactgcagttttttattgatcatgaagtgccacaggttaagtttgttgacagaacatttaactgtaagcatgatcatgcgatggcaatctggaattatatcaaagagcatgataaagggattacaaattttcattttgaagtggcagcagatcttctgaatgaggaagagattgaattgatccggagtttgcgtccaggactcattcagctggaaattggaattcagtcaacgaataaacagacgatcaaagagatcaaccgttccatgaatctggaaaaagtacgtgataaggtagcaaggattcatgagaagggaaatgtgcatcagcatttagatttgatcgcaggtcttccatatgagaattatgatagttttgctcattcttttaatgaagtttatgctatggaaccggatcagtttcagcttggatttctgaaagtactgcatggatctgtgatgcatgagaagatgaaagagtatgagctgctttgccagaatcgtccgccgtatgaagtgctttcaacaaaatggcttccatacagtgatgtgatccgtctgaagaaagtagaagagatggtggaagtttactataacagttttcagtttagtcatacgatgggacttcttgtggaattgtttccatccgcattttccatgtatgagaaaatgggcaattattatgagaagaaaggcttgtttggtttgaatcactcaagacttgcacgttatgagatattgtgggactttgtagaatcagaattagcagaattcagctgctcggaggaagtgcagaagaaagaagcggattttaaagagaaggtgcttgaaagcatgactttagatctttacttgagagataatgtgaagaatcgtccggcatttcttggagagagcaaagtagaaaaagatgtagcgtctgaattttataagaaagaggcagaagagcacaagtatctaaaggattatgaaggatacgacagccgccaactgcgaaagatgactcatctggagcgattgaatggaaagttgtatctttttgattacagacatagaaataagttgaatcaggatgcggcgatttatataatagaggactagtatagcgttgcagatattagaaagatatttgcatatggttttgttaatggaaatggagaaaaaagatgaatttttatgataaaaaagtaagacgtttggtgtcaattattattttggtggttattgttgcaatggttgcaacgatggtgattccatatctggtctaaggagagtgtaatgcggacagggagagtaacgcagacgatctggaatcgttctgtaaagaaacagatccaaaaagtaaacaggaattcaacaggaaaagccgcgtgggaagaaagcagttctgaactggcatctgacgataaggattttgtctggagcagcgcttcagtaagcggaaaagcaccggcacaggtgaaatatgcagtaattaaatcagcaggagatcttgcggcaaagagagtcagaccaacagcggtttcagtacagattttgtttcctgaaagttctgacgagcaggaattaaaagatattatgagaatcctgacagagatttgtgaggagacaggacttgccattacctgtgtacaggctgaaagtgcagagtatgttttgcagacagtgattcatattactgctgtcggcgtgaaagaaaactcaaaacagcagatgaaaaaatgggtttcgggaacggaaatcattctttgcggttatacgggattagaaggaacgttgcgattggttgaagagacagaggcagatcttcgtacaagatttacaccatcttttatagaaaaaacaaagcgttgcaaggaatcactgatacttccgaaacagattttaaagcttccggaagaagcgaagagcagacagtgtggggatggaggtgtactctgcggattatgggaacttgcagaggcagaaaagatagggtttgagattgatttttcaaaacttgcacttaagcaggaaacggtggaaatctgtgaattctttcagctgaatccatatcttctcacatcagccggaagttatctcgtattgacagagcatggagaagagacattggaaagcttgaagaatgcaggtgttccggcagtaaggatcggatttgtaaaagaacagaatgcaagaacacttgtaaatggagaagaaacccgttatctggatcgtccggcaccggatgaactgagccgctggtggaaagaacgaaaagaatcagaagaacaagaagatagaagaggcgataattatgttaaacattgtactttatgagccggaaattccggcaaataccggaaatatcggaagaacctgtgtggcaacagggacaaggcttcatctgatcgagccattgggatttaagctgaatgagaaagcattaaagcgcgcaggcatggattactggaacgatcttgatgtgacaacttatattgattatcaggattttcttgaaaaaaatccgggagcaaaaatctatatggcgacaacaaaagcgcacaaggtctatacagatgtagattatgagccggattgctatattatgttcggaaaagagagtgcgggaatcccggaagagattcttgtagagcatgaggaagactgtatgagaatcccgatgaacggagatatccgctcattgaatcttggtaattcggtggcaattgtgttgtatgaagcactgcgacagaatggatttgcaggaatgaatttaagtggagaactgcatgaacttcattggaaataaagtgaaaaaggaacagggtcaaatcatttgtaaaaaggtttgatcttgttccttttttgaatggtaaataatgatgtgagtgtcaaaagtaaattttgccactcactgatgtaaccggattgcttcgcatttcatgcaagcatgaaacgcatgatcttttgacccttgtattatcaaataatcagatatttatacaaatacacaaaaaacgtttaataaactacaaaaaatagacgaaatatttagtaatctaaaaaatttttataaaaatctaataaaaagtttgattattacgacaaaatatgctatgtttaaaataacatcgttgtgcgaaagttacaaacagaaagagaataggaaagaaaagtatggtaataatatattgatacgtgctgcgaacagcgtaatccttagatattaatgtgcagtaacaacatgcagcgaagaaatcttattgttcaaaatcacataagaacaataaaaaaggggaagacaagaaaggtggtgtagatactatggtggatgagacaatccggtcaattaaagaagcagaacagcaggcagaagagattcttgtaaaagcgcaggaacaaaaagaacagattctgaaagatgcatctcttcaggcaaagcagattcatgaagaacttgtagaagaggcaaaaagaactgccggtggactggatgagaaagccagagaagaggcgaaaaatcaggaagataaagaagcagagaagctcaaagatgtgatcgaagagctgaaggtttctgcaagagagaaaaaggatgcagcagtgcagctagttctttctgaattaatctgatccatgtggtcgtaacaaaaaaggagggataagattatggcggtacttaagatgcagaaaatcagcatctgtgccctgaagaaagatcgaaaagcaatcctggaacagttacagcatcttggagttcttgaagttgacagggaaaaagaagaggatgcattcttccaaaagatggacacaaccggacagcggatgaaatttgaaaaagcggcaacggcagcagatcaggcactggggattctggatgtttacgctccggagaaaaagtcattactttcttcgctggaaggaaaagaactgatcgatcgcgagttggaagaaaaggttcagatatctggaccggaattgatcaagacagcccgcggaatttatgatcttgatcgcgagtatgctgagcttagagcaggcatagcaaagattgagaatcagattgaaagtctgatgccgtggatggcattagatgttccgcttcaggaagggaagacaaaaaggactgctttgatcctgggaacaatgccgggagagcttactcttgagaacatttattccattctacttgagaagactccggaagtgatggagaaaacaggggtcgatgtacatttagtttcagcagaatctaatatgatctgcattgcagtcatctgtttgaaagaacaactccagacagtggaagaagcacttcggagtgcaggatttgcaagaccgtcccagaactggagcaagacaccaaaagagcagaaggaagtactggaaacagagatagcagcgtcaagagagcggatgacgcagtgcgaggcagaacttaagagcctggcttccaaaagaaaagaacttcaggccgtagcagattattacagagtccgagcagataagtatgcagttctcggagatcttcttcagtcaaagcgtacatttgtgatcagtggatatataccggcatgtgagtcaggtccggtagagaaatctttgacagagaaatataactgtatggtagatattgaagacattgaagaaggtgaagaagcaccggttattttaaagaataacccattctctacaaacatggaaggcattgtagaatcttacggattaccgcatgccggagagatcgatccgacaacgatcatgtcattcttctatgtattttttttcggaatgatgttgtcagatgcagcgtatggagcagttgttgcaattgtgtgtgcgattcttgtgaagaaatatccaagaatgtcacagaacatggcaaaatctttgaaattgttcttctactgtggagtatctacacttgtatggggtgttctatttggaggatattttggaaatatcgtagacattgtttcagaaaaattcttcggacatacggtaacagttccggcactttggtttgttccattgaatgatccaatgaaacttctggtttattctttgttatttggaacaattcatttgttcgtaggacttggaattaaaggttatctgtgtttaaaagatggtaaggttgtagattttatctgtgacgttgtactttggtttgtgatgctgatcgggttgatcctgatgctgcttccaagtgatattttcgcatcgattgcacagactacgatcgtgttcccggcggctttgaacactgctgcaaaagtgatggctgcgggtggagcaatcggtattgtgctgatgccaggaagagcaaacaagaatccggcgcttcggcttgcgcttggagcgtatgatttgtataacgtgacaggatggctcagtgacgcattgtcctattcaagacttcttgcacttggacttgcaacaggagttatcgcatccgttatcaatcagatgggagcgatgcttccaaacaatgtgatcggtgtgattcttttcattgtgatcttcattgtgggacacgtattgaacctggcgatcaatctgctgggagcttatgtacacacaaaccgtttacagtttgtggaattcttcggaaaattttatgaaggcggcggaaaagcattcgagccttttaaagaaaatacgaaatatgttgatgttaaggaggaaacaacattatgaatatagcaggtgaacttggagttgtatatggattattaggcgcagcaatcgcagtattattcgcaggtgcaggatctgcgttaggtgtaggtatcgcaggacaggcagcatcaggtgttgtaacagaagacccgagcaaattcgctaaagtacttattatgcagctgctcccaggtacacagggactgtatggactgcttgttggatttattacactttctaaaattggtattctcggcggtggcggagtagaagttagcgttcagtcaggacttatgatccttgcagcttgtctcccaatcggtattgttggattgatttcaggtatcgcacagggtaagacagcagcggcttctatcggaatcgtagcaaagaagccagagcagtttggtaaagcaatgctgttcccggcaatggttgagacatatgcgatcctggctcttctgatttccttcctcgcagtaagtggtatccagctgtaagaaataaataaaaaggagagcgtggagatgagtggacttgacaaaatgaaagcgcagataatcgcagaggcgcaggacaatgcaaaagagatactcgcacaggcacacgcacaggcggattctataattggggaagcaaaagcacaggcagagaaagatgcacggaagattgtcgcacaggcagaagccagagcagaagattctgtgaaacgcctggcctcttcatcagatatgagaaagcgcaaggcagtacttgaggcgaaacaggaagtgatcagtgaagttcttgaagatgcttacaaagcagtcggagagcttgatgatgcagcttattttgcaatgcttgaaaaggttcttgagaagtatgtacttccggaagaaggaaccatctgctttacagagaaagacagaaaacgtatgcctcaagggtatatggaaaaagtatatgaaacagcgaagaagaaaggcggaagcctggaacttacagagacagtgccggacggaatggatgggggatttatcctgacctatggcggcatcgaagaaaattgtacgatcaaagcgttgtttgatgcaagaagagaagagttatcagataaagtgaaccggcagctgtttacagcagtgtagccgcaaggagggataatcttgagtaagacaaaatatacctatgcggttgccagaatccgtgcactggaagtctctcttttaacgaatgcagtgattgaacagcttcttgcgtgcaagagtgcagaacaggctctacagcttctggttgaaaagggctggggagatctgacagcaggaacgttggatgcagatgaagttctgaataaggaagaagagaagatgtggcagacaatccgtgaggtggcaccggatatgcatgtattcgatgttctgtcacttccaaaactttatcacaatctgaaagcagcgatcaaagaagtgtgtacggaagtagagaataaaaatattttttacgatgactgtgagattcctggagaagagatgtttgcacttgtccagaacaaagaatttgataagctgccgggtaatatgccagcaacagcaagagaagcatttgacactctgcttcacacaagagatggacagctgtgcgatcttattattgatcacgcaacactggaagctatgctggaagcagggaaaaaatcaggtgagaagatcattgaagagtatgcacagacagcagttgcaatcgctgatattaagattgcagtaagatctcagaagacaggaaaaaatgcagaatttatgaagaaagcaatggtaaattgttccgagatcaatgtgaatcagctgacacaggcagcattggccggtgcggaggagatcgcacagtatctggaaggaacatcttatcgtgaaggtgccgatgcactgcgtatatcaccgtctgcatttgaacgctggtgtgataataaaatgacagattctatgaggtcacagaaatatgaatcattttccgttggaccgcttctggcgtatctgttagccagacaaaatgagatcaagacagtacggattatactgaccggaaagcagaatgaatttccggatgaagcaatccgggaaaggataagggagatgtatgtataagattgcagtaatgggcgattatgacagtatctatggatttgccaccctcggtcttagcatctgccctgtgaaggaccgggatgaggcgaagacaaagcttcgccagcttgcagaaggaaattacggcattatctatattacagaggctgtggctgcacagattccgtcagaaatcaacaagtacggtgagcagacatttccggcgattattcagatcccgggtgtgtcggggaatacaggagccggagttgaaggcgtgaagaagacagttgagcaggccgtcggatcagatattctgtttggaggagtaagcgaatgagcacaggagtgattaaaaaagtcgcaggacctcttgttatcgcagagggaatgcgtgatgcgaatatgtttgacgttgtccgtgtatcggaacagcgtctgatcggagagatcattgagatgcacggtgacgaggcatccatccaggtatatgaagagacatcaggtctcggacccggagaaccggttgaatctatggatgttccaatgtctgtagaattagggcctggtctgatcgcaagtatttatgacggaatccagagaccactggatgatattatgaagatttccggaaacaacctgaaaagaggagttgaagttccgtctcttaagagaaatctgaaatgggagtttgttcctactgtaaaggttggagatgaagtagagacaggagatgtgatcggtacagttcaggaaacagttcttgtacagcagaagatcatggttccttacggaattaaaggaacaatcaaggaaatcaaagaaggcacatttacagtagaagatattgtagcagttgttgaaacagaaaaaggcgaaaaagaattaactatgatgcagaagtggccggttcgtcgcggtcgtccgtataagaagaaacttccaccggagatgccacttgtaacaggacagcgtgttatcgatacattcttcccaatcgccaagggcggtgttgcggccgttccgggacctttcggaagtggaaagacagtaatccagcatcagcttgcaaaatgggctgaggcagatattgttgtctacatcggatgtggagagcgtggaaatgagatgacagacgttctgaacgagttccctgaactgaaggacccgaagacaggacagcctttgatgcagagaactgttctgatcgcaaatacatcggatatgccggttgcagctcgtgaggcatccatttacacaggaattacaatagcagagtatttccgtgatatgggatattctgtagcacttatggcagattcaacatcccgttgggctgaggcacttcgtgagatgtcaggacgtctggaagagatgcctggtgaagaaggatatccggcttatcttggaagtcgtctggctcagttttatgagcgtgccggacatgtagtttctcttggaaaagaaggaagagaaggagcactttccgttatcggagcagtatctcctccgggtggtgatacatctgagccggtatctcaggctacacttcgtatcgtcaaagtgttctggggactggatgcttccctggcatacaagagacatttcccggcaatcaactggttgaagagttactccctgtatctggatgatatggaaaaatggtttaacggacaggttgccgaagactggatggaaggccgtcagaagatgatgacactgcttcaggaagaagcagaactggaagagatcgttaagatggtaggtatggacgcactttcaccgtccgaccgtctgaagatggaagctgcaagatcgattcgtgaggacttcctgcatcagaactctttccatgaagtagatacgtatacgtcattgaagaaacagcacatgatgatggttctcgttaacgaattctttgacagagcaaccgatgcattaaaagatggtgcatcacttcagaagctgatctcaatgccggtcagagagcagatcggacgttttaaatatgtgacagaagataagcttgacgaagaatttaaacaggttgatgagacattaagcgctcaaatcgcagcagcatttgtaaaggaggaaggttaaatgccaaaagaatatagaaccattcaggaagtggccggacctctgatgctggtgcatggggtagaaggcgtaacatatgatgagcttggagagatcgagctggcgagcggagagactagaagatgtaaagttctggaagtgaacggaagcgatgtccttgtacagctgtttgaaagttcaacaggtattaacctctccaacagcaaagtccgatttcttggacgaagcatggaacttggcgtatcagaagatatgcttggacgtgtctttgatggacttggtaatccgattgatgagggtccgcagatccttccggatgccagaatggacatcaatggtcttccgatgaatccagcggccagatgctacccggaggagtttatccagacaggagtatctgcaattgatggattgaatacactggttcgtggacagaagcttccaatcttctcagcatccggtctgccgcatgcacagttggcagcacagattgcccgtcaggcaaaggtacttggaacaaatgaaaactttgcggttgtatttgctgctatgggtattactttcgaggagtctaacttctttatcgaaagcttccgtgagacaggagcactcgacagaacagtattgtttgtaaaccttgcgaatgacccggcaatcgagcgtatcgcaacaccacgtatggcgctgacagcagcggaatatcttgcatttgaaaaggatatgcatgtccttgttattctgacagatatcacaaactacgcagatgcattgcgtgaggtatctgcagccagaaaagaagttcctggacgtcgtggatatccgggatatctgtacacagaccttgcaacactgtatgaaagagcagggcgtcagaatggcaagaagggaagtatcacaatgatcccgatcctgacaatgcctgaggatgacaagactcatccaatccctgacctgacaggatatatcacggaaggacagatcatcttaagtcgtgagctttacagaaaaggagtaacacctccaattgatgttcttccatctctgtcccgtctgaaagataaaggaatcggagcaggtaagacaagagcagatcattccaatacaatgaatcagttgtttgccgcttatgcgcgtggtaaagatgcaaaagagctgatggttatcctgggagaggccgcactgacagaaattgacctgaaatatgcacgtttcgcagatgcatttgagaaagaatatgtatctcagggatatcagacagaccgaagcattgaggaaacattgaatatcggctggaagctgcttcgcatgctgccgcgtaccgaactcaaacgaattgacgataaatatctggatgaatattacgacaaagagtaagaatagacagagtgatcgaagatagaaagaggaggtggcggtattggctgcgaaacaagtgaatccaacccgtatggaactaactcgtttgaagaaaaagcggattacagccattcgtggtcacaagcttttgaaagataagcgtgatgagctgatgcgccagtatctggatcttgtccgagaaaatatggaagtgagacttcgtgtagaagaaggaattctctctgcgaaccgtaattttgttattgcccgggccggaatgtcagaggcagcactgaatactgcattgatggctccgaagcaggaagttggacttatagttgatgagaagaatgttatgagcgttgagattccgaccttcacatccaaaacaagaacagcggatgaaaatgatatctattcttatggatttgcgtttacttccagtgatcttgatggagcagtgaagtctttatcagatatcctcccagatatgatccgacttgcagaatgtgaaaaagcatgtcagctgatggcggcagagattgagaagacaagacgtcgtgtaaatgcactggagcatgttatcattccagagacagaggaaagtatcaaatacattacgatgaaactggatgagaatgagcgtagtacacagatccgactgatgaaagtgaaagatatgatgctcgaagaggcgcatcattacaaagaaaaagaggcgtaactattaaaaataaaaaagaacatgaccagagaataaaagtttctgtttaagaagtcttgaaactgtggggcatgttctttttcatgtttaaatctaaaaatgcaagcattttacatcttttttgaaattttgcttggctttgaacagttacaaatgcaaaacattatacaagaattttggattgcagaagatctgttaaaagttgtcttgctccggcctgaacctgttctaacggtacttttgatgtataagactcactgataaatccgaacagaccaaagcagatgaatccggcaatctgtcttgcagaatattttaaagaataagaagctttcagcttatctgtatgagattctaccgtgtctaagaggatccgataaaatcgaaaagccaggtaaggatttgtttccggtacgacatgctggaaaaaatcataacgttcatagtaaagagacaaaatactgtccaaaacgttcagatatccctgtgtgagattgttttcaggattgttttcctcttgtctgcgatggtatccttcttttccaataatcagcatatcattgaaaatgtcgtcaaggagggcaaatttatccttataatgtgtgtagaaagtgatccggctgacattggcaatcttacataattccgtgattgaaatcacatcaaaagcctgtgtggtcaaaagctttaaaagagcagactttaaagcacgttttgttttggtgatacgcttatcctccattgcggatattctcctttctgtgttctgtggcagattatacgaatgcggtgattgcttatctgtaaagttattttaacacctgtaaagaaaatggtcaaatacggatggatggggatgcattgctggtctcatgtagtgtgaacagtagtgcaggatagtgagtaacagaaatgtaacatttttcgaataattcttaatgaatcattactacatatttaagaagtatggtttataataaatataaccatatggatattgtatgctaaagatgatggaaatggtgatgtcagcaatatccgtaagaaaaagagcgttgtttacagtaacgcagagggattgggagagaatgcagcaaaagataaaggaaatgttgataaagataaaagatgtactggtgagtgtctggcatagttataaaagaatgcgtcaggagaacaatatttatttcaacatactggtaggtcttgtgttttttgcgattgtcggaacaggtgtatgtatggtggcaaatgcgcgggaagcagcagctttacgtcaggtagaaatacagaaagagaaagaagcacaagagaagaaaaaagccgaagaagaggcgaaaaaagcagaagaggcagcaaaggcagaaagagataagtccatgtctcttcagccgggagttgcagttggaaccatggatccgcaggatgatgagaaagtcgtttatctgacatttgatgatggtccgtctgcaaatacgcagcgtgtgcttgatattctggatcagtatgatgcgaaagctacctttttcattactgcccagcagccggattattttcctatgatcaagaaggtttatgatgagggacatacaattggacttcacagctatacgcatgaatatgatcaggtctatgcatctgtggatgcttattttgatgatcttgagaaaataggagaggtggcaaaggaacagcttggatttgttccatgctttatccgttttccgggaggcgcatcgaattctatttcaaaaaaatattcggcaggaatcatgacacagttgacacaacaggtgttggataagggataccagtattatgactggaatgtgagcagtggagatggaggaacggttacggaagatcagatcatcgcacagtcagaaacggatgagtataccaaagtaatgctcctgttccatgacacagaggcgaaggagtctaccattcaggcacttccgacggtaatggagtactataaaaatctggggtattcttttaaggcaatcgatcgggaaagcctggttgtgcatcatgaagtgaataattagaagataacagagaaaggaaagcaggagttggctgtaaagaagagcagtcgactccttttctttcttatgatatgatgtaagtgaaaaacgagaaaacaatgaaaggggcagattttatggggaataactcagaaaataagccagacagatatataaatataggtattgtagcgcatgtggatgccggaaagacgacattgtcagaaagcatgctctatcatgccggagcaatcaggaagcttggcagagtggatcataaagatgcgtttctagatacagatcagatggaaagagaacgtgggatcactattttttccaagcaggcagtattccggtggaaggatcgcacgatcacacttcttgatacaccgggacatgtggacttttctgcggagatggaacgcgttctgcaggttctggattgcgcggtgcttgttgtcagtggagcagatggtgtgcaaggacatacacagacattatggaagttattaaaaagatatcacattccgacctttctttttgtgaataaaatggatcaggaaggaacggatggtgaaaaacttctgaaagaactccgcaagcgttttggggaaaatgtcgttccatttgtggatatcatgacagaatccgactgcccgggtggaaaagtatatttacatacgaaagagggcgcagtggaagaggtgctggaagagctggctgtctgtgaagatgatatgatggaagaatatctggaagagggaaggatctctctggataaagtacaaaaagcagttgcagaccgtcaggtgtttccatgttattttggttcggcactacattctcaaggcgtggaagaacttttggatggacttgatctgtatataaaagataagacttatccggcagagtttggggcaaaggtttataagattgcaagggataatcagggaaaccgtctgacctatctgaaagtgacaggtggaagactgaaagtaaaagatgtagtggaaggactgaatgaaaagatcaatcagatccggatctactccggtgagaaatttgaggctgtccagaaagtagaagccggaagagtatgtgcagtgacaggattggaaaatacaagacccgggcagggaatcggagcagaagaagagtcagatttaccagtattagagccggtgttgacataccagatccttcttccggatgactgtgatgtacataagatgcttttgaacctaaagattttagaggaagaagaaccagaacttcatattgtatgggaggaacagacttctgagattcatgtacagttgatgggagatgtgcagattgagattttacagcggatgataaaggaacgttttggtgtgctggtagaattcggtgaagggagtattgtttacaaagagacaatcacagcaccggtagaaggtgtgggacactttgaaccattacgtcattatgcagaagtgcatctgcgtctggaaccgggagaacgtggatctggaatgcagtttgcagcagagtgcagtgaagatattctggacagaaactggcagcggcttgttctgacacatctggaagagaaggaacacaaaggtgtgctgacaggttcaccaatcacggatatgaagattacgctgacttccggacgtgcacatcagaaacatacggaaggcggagattttcgtcaggcaacttatcgtgcagtgcgtcagggattaaagaaagcagacagtattcttctggagccatattatgaattccgaatggaacttccatcagaaaatgtaggacgagctatgacagatatccaaaatatgtccggaaaattcggaacaccgataatagaagaagagacaacagtgctgacaggaagtgcaccggtgtccctgatgcgtggatatcagaaagaattcactgcctatacaggtggacgtggaagaatggcagtttcgttgaaaggttatgatatttgtcataatcaggaagaagttctggcagcgtcaacctatgattcggaggcagatctggcgaatccgacaggttctgtattctgtgcacatggagcaggatttgttgtggattgggatgaagttgaagaatatatgcatatggagcatacattggaatcaggaaatgatgatgaaatggatataatagaggtgacacttccaaaacgcaggcactccagtattgaactgacacaggaagagttggatgcgatctatgttcgtacaccggatccgaagaagaatcgttctacaggtcctgtaactgtccgggcaaaggaaaagacaagagagccgggaagcgcttatcaggatccgaagtgggaagcacgccggagagcgaaagccggaacagaagaataccttctggtagatggttataatataattttttcatgggaggaactgaaagaactttcagaaagagatattggtgcagcaagaggaaagcttgcagatattctaagtaactatcagggattccgcaaatgtaccctgatccttgtgtatgatgcttataaagtagaggggaatccgggtgaagtgatgaaatatcataacatttatatcgtctatacgaaagaagcagaaacagcagatcaatatattgagaagacagtccgcaggattgcgaagaatgcagatgtaacagtagccacatcagatggacttgagcaggtgatcatcatggggcagggggctcacagaatgtctgcgccaggtctgaaagaagaggttgagttggcattaaaagaactcagaggagagcatctgggcaggcaggtaaatctgaaaaattatcttttggattatcttgatgaggaaactgcaaaacagatggaagaaatccgtttgggaaaagaaaagtgttaatttttaatgaagatacaagttttttggtgatattaatgttatgatataagaaataaagtcgcaaaacgaacaagtgagcaaattggtcagtgctctgggaaagtgagaattgtgacttacgaaagcgaggtagagatgatgagatgtatgaactgttatcaggagataccggatagctgtaagttttgcccgaattgcggggcgaagcagccggtacagaagatggaacctgtatcacaggtgaaggaagaggcaacagataacataacagaagatacagcagaggtacagcagccgacagaaaaagtgcagtcagaagaagatgtgctgccggaagaaaaagtgcagccagaagaagatgtgcagccgacagaaccaacacagccagaggatgtggaaggttcatatcagaacgatccatacaaaagtgtgaatcaggagcagaatacttcctatggtgaaccaaacaactatgagtatggacaggggtacggtcagcaaaatcagaattatactcagcaagctccaaactatggtcagcagaaccagggatattatcagcagaataatttcaatggaatgccacaggagccagtgaactgggttccatatcttatattatcaattatttcaacattatgttgctgtcttccgtttggtgtagtgggaatcgtattctcggcgaagatcaatagtgctatgctggcaggaaatcttgaagaagcacagaataatgcgaagatggcaagaatctggattatcgtatcctttgcaattggtcttcttacatggttgatctacatggttctgatcgtgacaggggcagtttccggttcggcttattactattattaaaaagtgagcggaggatgatttggaagataaagatgcgtgaagcatttcaaacaaaaaggtcagccaggatcatcgcagttctgatgggggcagtgattgcagtggccgctgcgggttatctcttttttcataatccgcaccagtatccgctgccctgcctctttcatattattaccggactgtattgtccggggtgcggtgccgggcgggcaagttattctattttacatggaagattttatatggcattccggtataatccgatgtatgtgacattactcccgtttcttggtgtgtatattgtagcacgattgattgactgggttttgaccggtggtaatcatgtggatcagaagattaatcagaaagtcctatatgtggtattagttatagtggtggggttcggaatcgtgagaaatattccgatttatccatttacattgcttgtgccggcgggatattaaaaaataaaatcagagaaacgaagttctttcagattctgtttaaatgagtgacagagaaagaacttcattttttgatttattaaaaagcatgactaggaaaattctcaagaatatggtattatgaaaaatgatatattgtgcgtaaagaaaagtaacgcgtcaacctgaaggaaagaccgaaggttatcattcatcggtgatccgatgaaaagtaacaggatatggaggaatgaagaatgattaataaactggtagagaagatcaaaaagacaggtgcaccgatcgtagttggactcgatccaatgctgaattacatcccacagcacgtacttgataaggcttatgcagagtatggtgagactctggaaggagcagcagaggcagtatggcagttcaataaggagattgttgacaagacttatgatctgattccggcagtaaaaccacagatcgcaatgtacgagcagttcggaattcctggactgatggcatttaagaagacagtagattactgtaagtctaaagaccttgtgatcatcggagatgtaaagcgtggagatatcggttctacatctgctgcttatgcaacagcacatcttggaaagattaaggttggaagcaaggaatatacaccattcggagaggactttgcaacagtgaatccgtaccttggatctgacggagtgaatccatttgttgacgtatgcaaggaagagaagaaaggtctgttcatccttgttaagacatccaatccgtccagtggagagttccaggacagaattattgatggaagaccgctttatgagtgggttggtgagaaggttgccgagtggggagctgactgcatgggagatgagtacagctacatcggagcggttgtaggagctacttatccggagatgggtaaagtattaagaaagatcatgccgaagtcttacatccttgtaccaggatacggtgcacagggcggacagggaaaagaccttgttcatttctttaacgaagacggacttggtgcgatcgtaaactcttcccgtggaattattgcagcttacaagcaggaagcttatgcgaagttcggaccggagaatttcggtgatgcatcaagagcagcagttgaagcaatggtagctgatatcagcggagcacttgcagcagcaaaataatttcaagaaaggaattgcataagtttatggcaaagcagaaagaaaatgcagtagtacattcccaggaacagttggcggatggaatctacagcatgtggatcaatacagaggcagcaaaggacgcaaagccgggacagtttatttctatgtatacaacagatggaagtaaattacttccgcgtccaatcagtatctgtgagattgataaagagaacggaagactccgtgttgtttaccgtgtgacaggaccaaagacaggaacagaagaattttctaagctgaaagcaggagatatcattccggtgatcggacctcttggaaatggattcccatacaagaaggctgaaggaaagaaagtatttctgatgggcggaggaatcggtgtaccgccgatccttgaactggcgaaacagatggactgcgagaagaaacagatcgtagtaggataccgcgacgcacagacattccttaaggaagagttcgagcagaacggagaactttatatttccacagaagatggaagtgtcggaacaaagggaaatgttatggacgcaatccgtgaaaatgctctggaagcagatatgatctatgcctgtggaccgactccgatgctccgtgcgatcaaacagtacgcagaagagaatggaatcgagtgttatatctcactggaagagagaatggcatgcggaatcggtgcctgtctggcatgtgtatgcaagtccaaagagaaagacgcgcacagcaatgtaaataacaagcgtatctgtaaggatggtcctgtattcttgtctacggaggtggaaatctaatgaacatgagcgtaaatattgccggagtagaatggaaaaatccggtaacagttgcatcaggaacatttggctcaggagaagaattttcagaatttgtagacctgaaccgtcttggagcagtgacaacaaaaggtgtagcaaatgtaccgtgggcaggaaacccgaccccgcgtgtagctgaagtttatggcggtatgatgaacgctatcggacttcagaatcctggaatcgatctgttctgcgagagagatattccatatctgaagaattttgatacaaagatcatcgtaaatgtatgcggacacgctccggaagagtatcttgcagttgtagagcgtcttgcagacgaaccgattgatatgatggagatcaatatttcctgtccgaacgtcaatgcaggattccttgcatttggacaggatgcacataatgtggaaaagctgacagcgcagattaagaagatcgcaaagcagccgatcattatgaaactgacaccgaatgtaacagatatcacagagattgcaagggcagcagaagccggtggagcagatgcggtgtctctaatcaatacactgacaggaatgaagattgatatcaacagaaagacatttgcggtagcgaataagaccggaggagtatccggaccgatcgtgaaaccagttgcagttcgcatggtttatcaggtggcacaggctgttaacattccaatcatcggaatgggtggaatttcctgtgcagaagatgcaatcgaattccttcttgcaggtgcaagtgcagtgtctgtaggaacagcaaacttccacaatccagcagtgacactggaagtgatcgacggaatcgaagcttatatgaagaagaatggctttgagaatgtaaaagatatggttggtattgtaaaataaacccggaggtaagatagaatggaaagttataagaaagaatttatcgaatttatggtagactgtgccgcactgaaatttggagatttcacactgaaaagcggaagaaaatccccatttttcatgaatgcaggagcatatgtaacaggatcccagttaaagaaacttggagagtattacgcaagagcaattcacgagacatatggagatgacttcgatgtactgtttggaccggcgtacaaaggaatcccgctcggagttgtaacagcaatcgcatacagtgaattatacggaaaagaagtacgttactgctcagaccgtaaggaagagaaagatcatggcgcagataagggaagtttccttggaagcaagctgaaagacggagatcgtgtgatcatgatcgaggatgttacaacatccggtaaatctatggaagagacagttccgaaggtaaaaggtgcggctgacgttacaatcgttggacttatggtatccttaaaccgtatggaagtaggaaaaggcggagagaagtgcgcacttgacgaagtgaaggatctctatggatttgagacagcagcgatcgttacaatggaagatgttgtagagtgcctttacaacaaggaatgtgacggaaaagtagtgatcgatgatgaattaaaagcagcgatcgatgcatattatgagaaatatggagcaaaataaggaggcctgatgttttggaaaaagcgtatcgtgtaatgagaaacagcggagcaggtaacattgcaattggaattatcctgcttgttacaggagttacggtaggaattatttctattatcaatggagccagtctattaaaacataaaaataatataacattttaaaaggaaagtcccctcgtagcttgttcattgtgagtagttacgtccgaagtgaaccggcagaggggactttctttttctgtgaaggtgtaagaaattgacaaaaaaagaagcgaagagagtcaggacgcttggaaagatcctgtttatattatatattatcttccttgtatactttctgttcttatcagactggtacggcagggaaggcgtaatggatgaataccattacaatttggtgctattcaaagagattaagagatttattcaatacagacatcagctgggaacatttgcggtgttctcaaatttatttggaaatattctgattttcatgccagttggttacttttctgcaatggcaggaaaaagaagaagcttttttaaaacgttattttggagtttttgtctgactctttgtgtagagttaatgcagctgatcacgaaagtgggatgctttgatgtggatgatattctgctgaatacaatcggcggtgtacttggatatatagtttttgtagtttgtaatctactaaggagaagaaatgatcggaaaaaaagaaaagaaaaacgatgaaagagaaaaaaatcagaagaaagaaaaggaacgaaagagtaataaatcaaagaaatatgggaaagcagcgtatctgcagtcaagaagaggtgtgatctcctgctggttgaccggatggtcacttgctatcttgctgggatgtgtcggatatgcattcctgacgagaggaaaggcagccggaattgttggagggattgcaatcctttctttaatgattgatatatatggaatctggaatgcaatagaaggatttgaggagcaggatagaaaatatctttcctgcaaatgtggaatcgggatcggtattgtgcagatcttgtgcttccttggaatttttgttggaggtctgagcttatgatcggaaagttaagtgagttacagaaggagaaaaatgaacagtgcacacagcgtcacgaactggcagttgagcgtctgcgcacgatcgtgacagaagaaacagtgaatacagcctatatttcttactttcaggattgtaccttgtttctgcttgagttagagaatacacgaaaaaagctagaagatggaagctgggacagcttaagtcttgaagaaaagcgtagcctgaacaggattctttatagtgatattataggagagaaatatcagacaagctatgccaatcaagactatgcctgtgaaaaattggggcaggagatgggaaagcttttaagtttgttgtatacggaaatcagagcaggaattccgtatgtgtttgaacagcgcaaggattatctgacaatcctctatgagttgtttctcgaagtctatacctgtttcgagggaatgagtgaggaagagaatccagttccaaagccggagcagatcaaggagattctgtattggtatgcaagcgattactgtgatgtgttctatgcagatcgaattctggagcagatggatccgtcagcggattttgcagtacagatcattgaaaaggcagatcttgatgaagatgattatctgtatgaattcggtgagtacatttccaagaatgaacttggaacagctcatcatctgagaaatctgccacaggagacactgcagaagatggcagatgtatatacggaaggatatcgggttggttttattaatactggaaaagatctgtcaaagaaatcgattgtaaatatccgttacagtcttggatttgagaaggtgatccgtcttgcaatcgaaaacttccgtaagatgggattaaagccggttatttatcgcgcagcttccagcgtgatcacaaagagagagcaccacaagattggatattacggtgcaatcgcaaatcagcagtatgagtatgaccacagacaggatcaggcactctttatggacaagcgttatattgaacgtaagcttgaggtgatgaagaccgtttttgagcaaaataaagagatggcagcaggagttgcaggaccggcagtaatggagatattcggtgagactccattttcaccggaagcgaaagaaacagcaccggcatatgatgaggcgcagagagaactggatcttctctttagcagcagatcaggacagatcacgaatgagtatatcaagggtgaggaaagaagtttcacgattgttgcttatccggtgccggagattggggcagattatgcaaagatctttgatgaagtgatcaagatcaatacattagacgcgaagctttatgaaaaagtgcagcagacaatgatcgatgcgttagatcagggaacttgtgtacatgtaagaggaaaaggagaaaaccagacagatattacagtacagttatatcatctgaaagacgcacagaaggagacaatcttcgaaaattgtgtggcagatgtgaatattcctgtcggagaagtatttacatcaccggttctggaagggacgaacggcatacttcatgtaagcaaggtatatctggacggacttcagtatgagaatctgaagctgacatttcaggatggaaagatcaccgactatacatgtacgaactttgaggatgaagcacagaataagaaatacatttacgataatgtgttgaagaatcatgagactcttccgcttggtgagttcgcaattggaacaaatacgactgcatatgtggcagcaaagaaatttaatatagaagataagatgccgattctgatcgcagagaagacaggaccgcattttgcagtaggagatacatgttattcctggagcgaggaaatcagagtctacaatccgaatggaaaggaaattgtggcgaaagataattcctgttctcttcttcgtaaggaagatgtatcaaaagcatactttaactgtcatacagatataaccgtgccttataaagagttagaagaaataagtgtagtgacaaacgagggaaaagacattatactattagaggacggaagattcgtattgccgggaacagaggtacttaatgagcctttggatgaagcgggattttaaggaaatcctataggtaattggatagttaatagatgattaaatggaatctttcataagtatggataataaataaacaaagttttccaagggaaggaaaacagtataccactgaggaggaaatgatatgccaaaagtaggaattgtcatgggcagcgactcagatctgaaggtgatgagtaaggcagcagccacactggagaaatttggaatcgattatgagatgacgatcatttcagcacaccgtatgccggatgtcttttttgactgggcaaaggcagctgaaggaaagggaatcaaagtaattattgcaggagcaggtatggcagcacatctgccgggaatgtgcgcagcacttttcccaatgccggtaattggtatcccaatgtcaggaaagaatctggagggtatggacgcactttattcaatcgttcagatgccacctggaatcccggttgctacagttgcaatcgacggcggtatgaatgcggcaattcttgcagcaaagatgcttgcaatgtcagatccggagcttttagagaaactgaaagcttattctgcagagatgaaagatacggtacaggcaaaagcagacagacttgcagaagttggttatgaggaatatctcaacaataaataaatacgattcgaaagaaaaggagatttacgatggattacaagacatcaggtgtagatattgaggccggttacaaatcagtggaattaatgaaagaatatgtaaaagagacaatgcgcgcagaagttctcggaggacttggcggattctcaggagctttctctcttgcgaagatcaaagagatggaagagcctgttcttctttccggtacagacggatgcggaacaaaggtaaaacttgctatggtaatggacaaacatgacacaatcggaatcgatgctgttgctatgtgtgtgaatgatattgcatgtgcaggtggagagccactcttcttcctggattatattgcatgtggaaagaattatccggagaagatcgctgcaatcgtaaaaggtgttgcagaaggatgtaagcagtccgatgcagctctgatcggtggagagacagcagagcatccgggacttatgccggaagatgaatatgatcttgcgggattcgcagttggtgtttgcgataagaaagatatgatcacaggagagaatcttgcagccggagatgttctgatcggaatggcttctacaggtgttcacagcaacggattttcacttgtaagaaaagtatttgatattacaaaagaatctttagatacttattatgatgagcttggaactactcttggagaggcacttcttgctccgacaagaatctatgtaaaagcacttaaaagcatcaaaaatgcaggtgttacggtaaaagcatgcagccatatcacaggtggcggattctatgagaacattccgcgtatgctcaaagaaggaacccatgcggttgtagaaaaagacagctacccgattccaccaatctttgcaaaacttgcaaaagagggcgaaatcgaagagcagatgatgtacaacacattcaacatgggacttggaatggttctcgctgttgatccggcagacgttgataagacaatggatgcaattcgtgaagcaggagatcagccatatgtagtcggcaagattgagactggcgaaaagggagtgactttatgttaagagtcttaagtatggtgtcaggaggcggaacaaaccttcaggcaatcatcgacagcgtaaagaatggaatgatcacgaacacagaacttgtgggcgtgatcagcaataataagaatgcctatgcactgacacgtgccaaagaaaatggaatcgatgcgaaatgcatttctccgaaggactacgagtcaagagaagtgttcaatcaagaacttttaaaggctgtagatgcatatgagccggatctgatcgtgctggcaggttaccttgtggtaatcccgccggagatgatcaagaagtataagaaccggatcatcaacattcatccatctctgatcccatctttctgtggaacaggttattatggattgaaagtgcacgaggcagctttggagcgcggtgtgaaagtagttggtgcaacagtacatttcgtagatgaaggaactgatacaggcccgatcatcttgcagaaggctgtagaagtacacaatggagataccccggaagtgcttcagcgcagagtgatggaacaggctgaatggaagatccttccacatgcaatcgatttgatcgcgaacggaaaggttgaagtagaaggacatcgtacaatcgttaccgagtaaggaggcagagactatgaacgtattgatcgtaggaagcggcggaagagagcatgcaatcgcagcaagcgtggcaaagagcccaagagcagacaaaatcttttgtgctccgggaaatgccggaatcgctgagtatgcgcagtgtgtaccaatcggcgctatggaatttgataaattaagagatttcgcaaaagagaatgcgattgatctttgtatcgtaggaatggatgatccgctggtaggcggtcttgtagatgttcttgaagaagcaggaatccgcacatttggaccgaagaagaatgcagcgattcttgagggatctaaagcattttccaaagacctgatgaagaaatataatattccaacagcagcttatgagaactttacagatccaaaagcagcagttgcttatcttgagacagcgaagttcccgattgttttgaaagcagatggacttgcactcggaaaaggtgttctgatctgtaaggatctggaagaagcaaaagcaggcgtgaaagagatcatgctggataagaagtttggtacagccggaaatgagatggtcattgaggaatttatgacaggccgcgaggtttccgtactttcttttgttgatggaaagacaatcaagacaatgacaagtgcgcaggatcataagcgtgccggagacggagatacaggacttaatacaggtggtatgggaacattttctccaagcccgttctatacaaaagaagtagaagaattctgtgagaaatatgtttatcaggcaacggtagatgcaatggcagcagaaggacgtccgttcaagggagttatcttctttggattgatgctgacagaagacggaccgaaggttcttgaatacaacgctcgtttcggagatccggaagctcaggttgtacttcctcgtatgaagaatgatatccttgaagttatggaagcatgtatcgacggaacactggatcaggttgatcttcagtttgaagacaatgcagcagtctgtgtcgtactcgcatccgaaggatatccggtaagctacgagaaaggcttcccaatcacaggactggaagagttcaagaagcacgaaggatattactgcttccatgcaggaacaaaattcaacggagatcaggtcgtgacaaatggcggacgtgttcttggcgtgacagcgaagggaaaagatctgaaagaagcccgtgcgaatgcatatgcagcaacagaatgggtaaactttaagaataaatacatgagacgtgatatcggtaaggcaatcgatgaagcgtaaataaagggtcgcagacttggttcaataagataaaacaatataagaagtaatgaagtaatgaaggaaaccggcagggaggaaaaatccaaactgtcggtttctttgtgattttatcacagaaaaataaaaaatatgtgctatactagggttgtaacaaaggaaaaaggtaactgtttagttacagataaaagatataacatctataaggaggatataaagatggcagtagtaaaacttacaacagacaattttgagcaggaagtacttcaggcacagcagccggtactcgttgatttttatgcagactggtgtggaccatgtaagatgatggctccaatcgtagaagctctttcagaagaactcagtgatgtaaaggtatgccacatcaacattgatgagaatatcgacattgcacagaaatacagagtgatgagtattccgactttcatcgcatttaaaggtggtgaagagagcggaagacagattggtgcgattcctaagacagcactggttgaccttgtgaaataaatttgcgataataaaagaaaggaaaaacccagacgggctgccgggcacagagaaggctgagagatatggctcattcctgtgaacgacagcctgtcttttgcttagatattaagaagaaaggcgggagtcagagcatgtcattgcagtttattttcgggaattccggaagcggaaagtcccattatttatatcagcagattgttgaggagtcaatccgtcatccggagaagaattatcttgttctggttccggagcagtttacaatgcagacgcagaaggacctgtgtatggcacatccgcgtggcggtattatgaatattgatgtcttaagttttggacgtctggctcaccgtgtttttgaagagacaggaaaagaaagacagtcgatccttgatgatgagggtaagaatctggtgcttcgtaagattgcaggaaattacgaagatgagctgaccgttcttaagggaaatcttaagaagcagggatatatcagcgaagtgaagtctgtgatatcagaattcacacagtatggaattgattttgaacagcttgattctttcatggaaggactgaatccggaaagttatctgtattataagttaaaggatatccgtaaagtatatgaaggatttgaggattatctgcgtgataaatatatcacaaaagaagaattacttgatgtgttgagtcagactgtaccggaagcgaaaatgcttaaagacagtgtgatcgcaatggatgaatttaccggatttacaccggtgcagaaccggctgatcggggaacttctgaaagtgtgcgacaagattatgttgacagttgagatcgatcggagggaagatccgtttgtctataagcatccgtatcagctctttgcgttgagtaagcagatggttacttcactgacggaagtggcgcaggaagtgagagtggagattgatgagccggtctggttatgcaagaatccgtcgtatcggttcaaagagaatccggagatggcgtttttggaagaggaactatttcgttattccagaagaaaatacagtggagagaagatgcggtcaatttctcttcatgaagttcatacaccacaggaagaggcacagtatgtggcagaggagatccggcgtctggtgagagaagaagggtacagatatcgggaaatcgcagtgattgcttcggatctgagtacttatgcagatgctttggaaaaagcatgtgatcgatatgaaatcccggtctttatggatcataagaaaagtattttattaaattcttttgtagagtatttaagaagcttgctggtgatggtagaacagaactatacttacgaaagcgtttttcgttatctgcggaccagcctgtgtgggtttacaagagatgaagtagaccgtctggaaaattactgtcttgcgctggatctgaaaggattcaagaaatgggatcaggtctgggtgagaaagacaccgatgacgacaaaggaagaactggaagaactgaaccatctgcgcatgcgttttgtggaaaaactgacaccgctgcatacagttctgaagaagagaaaaaagacggtaaaagatatcacacttgcagtttatgaatatctggttcaggagaagatccaggagcagcttgcagaattggagcagaaattccaggaagatggagaactggcactggcgaaggaatatgcacagatttatcgtattgttctggaattatttgataaattcgttgaacttctgggggaggaagagattcctttgaaggaatactgtgaacttttagatgcaggacttgaagaggcgaaagtaggtgtgatccctccaagtctggatcaggttgtgatcggagatatggagagaacacgtatcaaaaatatccgcgcattattttttgtcggagcaaatgatacgcttcttccaggaaatgcaggggcaagaggtctgctttccgagcgagacagaaaacagtttcaggagaagaaaatgaatctttctcccggaccaaaagagaaattatatattcagaaattttatctctatatgaatctgacgaaaccgtcagaacttctgtatctgtcctgggcaaaagtatccggggaaggaaaagcacttcgtccagcgtatctgatccaggatctgatgcgtctgttcccggtacttgttccggtagaggaagacagaaaggggctgcttgatcatgagatgatgagaaagagcggactcttgcagattgcagaaggtttaagagagagggagcatggactggatgattcctggaaagaactgtacagatggtttgtaaaggatgaacagagtcaggaaattctgaagcagatgatagaagccggtttctaccggaaggatgagccgagccttggaagtagagtagcaaaagaactcttcctggatccaaagcgtgtcagcgtaacaagactggaacgttttgcttcctgtgcatatgcacatttcctgaattacggactccgtctgtcagaacgggagaaatatgggttcgaagcaatggatctgggaaatattgcacatcaggcactggagcgatttgcacacaaggtagaagaggaaggtctggactgggttacaatgccggaagagaagcgggagcggctgattgatgaaagtgtagaagaaagtattctggattatggaaatacagttctattttcatctgcacgtaatgagtatatgatccacagaatcaagcaattgatcaaccggtccgtctgggcactgacacagcagatggcggcaggcgattttgtgccgagcgggtgtgaatttaagttcgggagcggaaagattgacagaattgatacatgtgaagatgaaaatgcagtctatgtgaaggtaacagattataaaactggaaggaaagcatttgatatcacagcattctatcacggtttgcagatgcagcttccggtttatctgaatgcggcactggagatcgaacggcagaaacatccggagaaagaagtacttccggccggtattttttattacaggatccaggatccgattgtgaagaaagaagagacaaaagcggaagttgagcaaagtattctaaaagagctgaagctggatggactgatcaatgcagatgaaaatgtagttgagcatctggaacggaatctgagtggaacttcaacattctatccgctgcggatgaataagaacagaacgctcggttcggcatcaaaagctttatcaaaggagaactttgatacggttcttgcgtacacgaaagagaaagaaaaagagctgaaggacgtgatgtatcagggagaggttgcggcacttccgtatgtacttgatgagatgacaggctgtgattactgtgggtgcagggatatctgcggatttgaccagaggattgaaggctgtgagtacagaagattaagaaaatataccttggaagaagcgttgaattctatgaaagagcgtcttggcattttggaagagaaaggggaggcaggagaatgagcataaaatggacagaagaacaacagaaagtaatcgacttgcgtgaccgcaacattctcgtatctgcagcagcaggttccggaaagacagcggtacttgttgaacggattatttccaggataacagatgaaaatgatcccgcggatgtagaccgtctcctggttgtgacttatacggaagcagcggcggcagagatgaaagaacgaatcggtgcagcaattgaaaagaagctggaagaacagccgggaaatgtgaatctggagcagcagtccacattgatccacaatgcgtcgatcatgacaatccacagtttctgcctgtcggtgatccgggatcattttcatgtgattggaattgatccggcctttcgcattgcagaagaaggagaattgcgtcttctgatgcaggatgtcttagaagagctgatcgagaatttctatgcagagggatccgaggcatttttaaactttgttgaccagtatggaacaggaagaaatgatcagaagatcgaggaacttatcctccagctttatgaatattccagaagttatccacagccggaaaagtggttgaaggaatgtgtggataattatgagatcgatccggagaagatggaagaagcagatgtcgtgcaggaagcaaaggcaagagtaaggaagaatcttacagatgtgaaagggtttgttcaacaggcgatagaagtatgcgaacttccggccggtccgtatatgtatggtgaaatgttagattctgatctggtacagattgagcaattggaaggagcagagacattttgtcagcaagagcagatcatcagtgattttacatggaaacgtttgtcaggaaagaaagatccgacagtcgatccggagctgaaagagaaagcgcaggggcttagaaaacaggccaagaaactgatagaagatctgaaagcaaactatttctacgcgcctgttgatgagtggatcagggatatgcaagaggcacagacagcaatgaagatgttagttctgctggtacaggcttttgcagaggcattttcggagaaaaagagacagagaaatctgttggacttcagtgatatggaacagtttgcacttcggattctgacggaagaaaaggaaggaaaactggttccgtcagcagtggcacaggagtatcaggaacgctttgaagaagttatgatcgatgagtatcaggatagtaacctggtgcaggaaacaattctgacgagtgtgtcaagagagtcggcaggacagaataatctttttatggttggagatgtaaaacagagtatttaccgattccgcttgtcgcgcccggaactctttatgggaaaatataacagctacagtacgcaggagagcagcaggcagagaattgatcttgacaggaacttccgaagcagaggagaagtacttgacagtacaaattatattttcaggaaactgatgcggaaggaattcggagaaattatctatgacgataaggcggcactgcatttgggagcctcttttcctgaattaccggatgaaaatgtgtttacggatcagacggaactgcttctttataatcagacgggacttcggagcagtgaagcgagagaagaagaggcgcggatgatcgcacagagaatgaaagaacttctaaacacgggtgttgtgcttgataaggagacaggagaataccgcccggttcattatcgggatatggtgattctgacgagaagtttacaggggtgggcagaagtttttgcgtccatattggctgaggagggaattccggcatactctgtgagcagagaaggatatttcgagacgtatgaggtcagtgttcttctggattatctgaaagttcttgataatgcaagacaggatctgccattgacagcagttttgacttcaccgtttgccggtctgacggcagcagagttgtcagtgattcgtcttgcgtatccgaatcagttgttttacgaggcagtggaaggattttgcagcctgagttcggaagaaattccggaaactgtggacaaaaagcaggcaatacaggtacaggaaaaattgaggaagtttttcgaggtattggatcattttagggaaattcttccgtatacggcaatccatgaccttcttgtggaaataattgataaaaccggctatgggttatttatcagtgcgatgccagggggcgcacagagacaggctaatgtagaaatgcttgttgagaaagcaagagcatttgaagggacgagttataaaggtctgtttaatttcgtacgctatattgagcaactgaaaaaatatgatgttgattatggcgaagcaagtatcatagacgaacaggatgacacagtccgtattatgagtattcataaaagtaaaggtctggagtttccaatcgtttttgtagccggaacaggcaagcaattcaatacacaggatctgaaaggaagtattgtgatccatccgagaaacggagttggaattgacgttgtagatcttgagatgaggacaaaggcaccgacttttttgaagaaaatgatccaggagaagacaaagcttgagaatcttgcagaagaactccgtgtgctttatgtagcgatgacaagagcaaaggaaaagctgattctgacaggaagtctgaaaatgggagaagacggtctggagccttatgtgaatcatatgacagacagggaatcttcattgagcctttatcagttagaaggcgcaaaccgttatctggactggattcttccggcacttcttcaggaagaagatctcaagagagaagatggtttgtgtggaattctcaaaacagaaagtgaagaggtgcagcaattgccgattaaagtccggatttttgatgcagaagagatggattttacagaagatgcacagcgacaggcagaagtaatcgcaagagaagtgcttgaacactgggatacaacgaaggtttatcttccgggagcggaagaaaagctggaacagcagatgaatttcctgtatccatataaagaagaaggaaaaatgaagctgaaatttacagtttcagagttgaagaagcgtgagtctttgcaggaagaatcaggagaagaattgattcaggagccggagattgtgccactgcttccgcatttcatggaagaacagaaagaaggactgacaggagcttcaaggggaagtgcttatcataaatttctcgagcttcatgatttttcaaaagagtatacagaggaacttctgaaagaagaaatcgaactgttctatcaggcagggagactgtcaaaagagatggcagactgtatccgcacgaaagatattcttgcgtttttaaatagcgagagtggaagacgaatgacacaagcagcaggaaatggaaagcttcggaaggaacagccatttgttctcggagtagctgcatcagaaatctatccgaagatctatcaggacattcagaagagaagtcaggaagcggatgaaaatcgaaaggaagagaccattctcatccagggaattattgatgtctggttcgaggaggaaaacgggcttgtactactggactataagacggatagagtcagaaatgcatctcaattgaaagaactgtaccatgcacagcttgattactatgcccaggcattggagcaactgttagagaagccggtgaaggagaagatcatctattcctttgccttgaaggaggagatcatcttatgaaatatttctgttattatctgatatttatcaatttatttgcattttgtacctatggaattgataaatggaaagcgaagaaaggcgcatggcgggttccggagaaaacgctgctaatccttgcactgatcggtggaagtgcaggagcaatcgcaggtatgatgtgcttccggcataagatacggaaagcaaaatttatgattacagtgcctgtgatctttgttgtggaggcaattttgctgattatctggcttttgtaagaaagaaaaaaagaaaaatattctttatcgcatcatcaatttgcacagttaaagtgctgaaattattatcaaagaaacaagattttacaaaatcttgtttctttttttcaacttcttttcgaatgaaaaaaaatctgttaatataacacataggaatactagagttattgattgcagaatactgtgaacagcatgaaagcagctgggaaaggagtttgacaaagatgccaaagttaaatgaaaattatcagaatgtaaaagacagttatctttttgcagagatcgcaagaagagtaaaagtatatgaggaaacacatccggagaaagcggcggatattatccgtctcggaatcggtgatgtaacattgccattgacaaagagtgtgatcgaggcacttcatgaagcagtagattctcaggcagtatctgagacattcaaaggatacggaccggagcagggatatgcatttgcacaggaagcaatcgcagattattacgcacgcaatggcgtagaagtaaaagctacagatatctttatttcagatggtgcaaagagtgatacaggaaatattacagagctttttgcaaaggataacgtggttctcgttccggatccggtttaccctgtttatgtagatacaaatacaatggatggaaagaatattatctatatgaacggaacaaaagaaaacgatttccttccaatgccggatgaaaatgtaaaggcagatatcatttacctgtgttctccgaacaacccgacaggagcatgctataataaagagcagttagaggcatgggttgcctatgcactgaaaaatgatgcggtgatcctgtatgattccgcatacgaagcatttatcacagatcctacacttccaagaagcatctatgcgatcgagggcgcaaagaaatgtgcgatcgagttctgttccctttctaagacagcaggattcacaggtacacgtttctcctatacggttgttccggaagaacttgtgtttgagacatcaaatggcggaacattgagtctgcacaatatgtggaacagaagacagtgtacaaagttcaacggaacaccgtatatcatccagtatgccggagctaaggtattcacagaagagggcatgaaagagtgtcaggagaatatcggatattatcgtgaaaatgcgcgtatgatcgccgaaacacttgagaagaaaggaatctcatttacaggcggcgtgaactcaccatacatctggttcgagtgcccgaagggaatggagtcctgggagttctttgattatctccttgaaaatgctcaggttgtcggaacaccgggagcaggatttggagaaaatggaaagaattatttccgtctgacatcctttggaaaacatgagaagacaaaagaagcaatggagcgtttcaattcattattctaagatataaagtaaacggattacatgcgtaacagaagaaagttatcatagtgacggtttacagaaggaaaagagaagctgaaaacagcttctctttttgttgtcaggcaaagctggaatcctgaacagcaacattttgtattacattagaaacaaatccggtgtgagtttacaagaccgtacaagtttggtatgatagaaacggtatatcagatgtgagataaactcccatctgacatagcctctggcaggattgcagaggtgcgcaggagaaatatgtcctgcattcgcatgacgcgcacctcgcagcaagaatgctgaggcattcttgatatttgaaatttagaaaggatggaacgttaaaatgaaaattggtattggtaacgatcactccgcactggagctgaaagcagaaatcatagaatttctgaaagagaaaggtcatgaggttgtagattatggaacatatacaacagacagctgtgactatccggtgtatggagagaaagtggcccgtgcagtcgtagcaggagaagtagagaaggggattttgatctgcggaacaggacttggaatctctctcgcagcgaataaagtaaaaggaatccgtgcatgtgtctgcagcgagccatttacagcgaagatgtcaagagcacataatgactgtaatgtacttgcatttggagctcgtgtagtaggtggagaacttgcaaagatgatcgttgatacatggatcaatacagaattcgaaggcggccgtcatcagcgcagagtagatctgctgatggagatcgaggagagaaactaaaagatttcaagaaagagacttctgcgttacattttatcagagcgcggaagtcttttaaaaaaggggaagaaaaatgcaggaatacgatttatcacaatgggttttattcttttttctctacagttttctgggatggatctgggaaagctgttatgtttctgtcagaaagcaccgttgggtgaaccgtggatttatgcatggtccgatgcttccgctctatggttccggagcaatggttgttctgatcgtgacgattccggtcagagataacatcctgcttgtttttcttatgggaatgatcggtgcgacaatcctggagtattttacaggaattacgatggagcgtttgttccacgtaaggtactgggattatagaaacctgaaatttaatgtcagaggatacatttgtccactggcaagcttgtgctggggagtattctccattcttatggtaaaggtcgtacatattccatttgaacatatggtattgttgattccggttacaatagccgatatccttgcatttgttctgacaatcgcagcagcagttgacttcacacagtccttcaacgaggctatggatatgaaacgtatccttgtacagcttgaagccagcaaagaacagatccagaagatgcaggagcgcctgaaagatgcttctgaggaaatgcaggacagactgaaagatgcatcagaaggtgttcaggaacggctgaaacgtgcatctgaaggggtacaggagaggcttgaggacagctatctgttgtatgaagagcgtaaagagatgaaagcagcggagaagcagacaagaaaagaattgtatcttgcgaagatagaagaacagcgtagagaacgaaaagaacagcttacacagctttcagagaaggttgaggcactgcttcgtactgtccgactggagaatgaagcacaagagtctgaatcgaaaggaaactggagaaaagaacttgcccagatgcgttccaatatattaagtgagagacagaaattaggctcacgtacagacagaaattatgtaaatgctatgagacagctgagaagaaaccctacagcagtatcagacaagttcaagaatgcgatggaagaattaaagaaaaatgccgaggtgaaataaatgacaaagaaacagcgtgcgcttgaagtgattgaaagactgaagaaagagtatccggatgcaggatgcacgcttgattatgatcaggcatggaagctgctggtcagtgtaaggctggcagcacagtgtacagatgcaagagtaaatgtagtcgtggaaggtctttatgagaaatatccaacagtagaagcactggcagaaactccggtggaagatattgaagagattgtacgtccttgtggtcttggaaagagtaaggcgagagatatcagtgcctgtatgaagatgcttcgggatgaatatggtggaaaggttcctgatgattttgatgctttattaaaacttccgggagtcggaagaaagagcgcgaatctgatcatgggagatgtgtttggaaagccggcaattgtgacagatacacattgtatccgcctgacaaaccggatcggtctggtagatggaatcaaagagccgaagaaggtggagatggcattgtggaagattatcccgccagaagaaggaagtgacctttgccatcgtcttgtttatcatggaagagagatatgtactgcaagaacgaaaccgtattgcgacagatgctgtttggcagatgtttgtaaaaaggtcggagtatagtaaaaagatcagggtataacagtcaaaataaaaagtctgtgaaaagaatcttaagagtagatagattctttcacagactttctttctatcagtctaagctaactcaatagcacctgttccgccggcacaagcatagtaagctttcttatcctcaggttttacatagatcttaaggtcggagctgtccataccttcagctttgcatttatcaagaatcttctctgcaagtacagcagcgtcatattcgccgttctgatactggatgaaaagatcatatgccggagcaacatttactggtgcagttgtttctgttacagtcacttccggaacaggttcagctgttggtgcagctgtctctactacaggctgagcagctggtgctgtggtagtcggatgtacctcattaaatcttttctgtcttttcttatctgttctcttgctcatggatgttacctcttttctctaatctgaaaaccgaagtccgggatgtctgtccttgctggttgaaataatttagtaaaaagggggacatcggtcacttttcctattatataacgaagtggaaaataagtcaaaaaagttgtattttttatcagattcgtatattatgatgtaagtgtcaaaagtataaattgcgtttgtgcttgcacaaataagcaatttatacttattgacacgccgaacaccgaaaacggaataaaatggtgtgaatacgccattttatgggagtttgaggtgttcgaggattgcgggaattgcatagcaatggagcaatccgtaggtagcataataaaaataaggtaaaagtcgtcagggcagaaaggaaagttgatatgaatttttcacagcttggaaagatacaggaattaaaaggacatatggatacatttcgcagaaatcatccgaagtttccaatgttcttaggagcagtagctcagaatgcagttgaggaaggcacgatcatcgagatcaatgtgacagcaccgaacggagctcattacgagacaaatctgaagcttcgtgcagaagatctggaatttatccgtgcactgcaggagatgggaaaataaaaaatataagaaaattaaaaaagtacttgcatatttaaaaagagtatgataagatactactcgtgtcagagataagacacgaaatgcgggtgtagttcaatggtagaacaccagccttccaagctggatacgtgggttcgattcccatcacccgcttttttgttgccctaattttggagggcagaatcaaagttgtacagaaatagcgcgaagcattttccatagattcggttttgataaaccggataaggaaagtgctttttttcaattatttttgtactattttttcgtcctgttaacgttgtttcttatatggagttgtgctatactttaagaaatatttttggggttacactgagcagtaacacattttggggaaattacagaggaagaggtagaaagatgaattttttggaagaaagaattgtaaaagacggtattgtaaaagagggcaatgttctcaaggttgacagtttcctgaatcatcagatggacattaaacttttgaatcagatgggtgcagaattcaagaagagatttgctgacaagaacatcaataagattcttactatagaagcttccggtataggaatcgcctgtatcgtagcagaacactttgatgtaccggtcgtatttgcaaagaagtctcagagcatcaatttagacggcgagatgtatgtagcagaggttgaatctttcacacataagtgtaagaataatgtgatcgtttcacagaagttcctttcagaggatgatcatgtacttattattgatgattttcttgcgaacggatgtgcactgcagggactgattcagatcgttcagtcttcaggagctacagtagaaggtatcggaattgcaattgagaaaggattccagtcaggcggaagaatcatccgtaaccttggattccagttggagtcactggcgattgtagatggaatggacgcttctacgggtcagattttcttcagagagcagaacgcagagaactaagagaccaatatttttaaaaaagctatagtaagcttaagaaaatcttttgaaacatataaaagcctcctttagatttacagagtattctgtagatatataaaggaggttattttttttaggaggaaacaaaatggagatcaatcacgtattaattgtagaggatgataaagagattagagaaggcgtacagatttatctgcagagtcagggatataaggtgtttcaggcagcagacggcatcgaaggattagaagtccttgagaaggaagaaattcatctggcaatcattgatatcatgatgccacgtatggatggaattcgtatgacgatgaagttgcgcgagaaatacgattttcctgtaatcatgttgtcagcaaaatcagaggaagttgataagatcacagggctcaacatcggagcggatgattatgtgacaaagccgtttacaccgatggaactgatggcccgtgtgaattctcagctgagacgttaccgcagatttctggagaagctggtaccacaggagaatgtacatgtgatcggaggacttgagatcaatgaggatacggtagaagtcacaatggatggcaatccggtgaaattaactccgatcgagtacaagattctgcttcttttggcaaagaatccgggaagagtcttttcatccgaagagatttacgaaagagtatggcaggaaaaggcaattaatacagatacgatcatggtacacgtaagaaatattcgggagaagattgaaatcgatccgaagaaaccaaaatatttaaaggtggtgtggggagttggatacaaacttgaaaagcaaccgtaagataagaacaattataacgatagtaattcttagcttattcgcagcaggtgttgtggaaagttattatgtggtaagaaaagatatcgcatcaacatttacagtagaagatgatgttgaagagtgtattgagcgaatggactattcccttgcgacaggaaatcgccttctctatagcgaggtcacagatgcgatggatgcatcggaacagatggaattaatgtcagacagtgcattctctctttttaaaaaatatatggattatcagatctttgacaaagaagggaatcccttgcttgcaggaaatgacgaccagacaaacgaggctttgaagtcagataattcttatgttctcaaaatcgaatataagtatggcacatccggaacaatgtcaaatgtaacagttagcggtacgaaactgtcaccggaagaagcgtacgatgtggagaaagatctgtcttattattgtatggatgcagatcttgaggatcagattgacgatgaagagcagacaaacggaatcagtatcgtttatgggatgacagatgcaaattatgatgaattcatttctgcaaatcaggaggaagacgagtatgtggattataattattccatgttctggagttccgctgcactcttctttttaggagctctgcttgcagcattacttcttccatgtattccaaaagttggaagatacgaaggaaaaatattccgcatgccatttgaattggcagtgattctggggatttctgtaataggtataggctatgaggcatttgcggatttagtatattggtcatttgagaactatcacccgtcaggaaatattatgtggaatacgatcagtatgcttggaatcaactggatcatctggttctgcctgctgggagttttcttctgtgtggcagagagtctgcgcctcatatttacttccgaaaaagagtactggaaagaacacacaatagtaggaatgctgatccgttggggaaaggaaaatcgtggagaagtacatgaaaagagacatttattgaagaaagcatggaaagatatgaaagcatttttgtatcatcaatacgaagcaattcttcagatggacctgcgggataaaggaaataaaggaatcctcagaatcgtaatcctgaactttcttctgctcttagtagtgaaattattttcttacagcataggactgataccattaattgtttattctatcattttattctttgtaatgaagaaagtgctaaatggaatcaagaagaaatatcagcttctgcttaaatcaacaaatcagcttgcagaaggacagctagatcttccaatcgaaggtgatgtcggaatcttccgtccgattcaggatgaattaaagaagattcagagcggattcaagaaggcggtggatgaagaagtgaaaaatgagcgtatgaagacagagcttgtgacaaatgtctctcatgatctccgtactccgctgaccgcgatcatcacttacattgaccttttaaagaatgaaaaagacgaagaaaagagaaaagaatatacagaagtacttgagagaaaatctcttcgtctgaaagccctgatcgaggatctctttgagatgagtaaggcagcaagtaagactatccagatgaattacatgaaagtggatctcgtaggactgatccgtcaggcggagcttgagaatgaggaaaagattagagaagcacatctggaattccgttggaaacttccggaggacaaagtagttctctggttggatagtgaaaaaacatatcgaatttttgagaacttgattgttaatattacaaaatacgcaatgccgcatacgagagtttatatagaaatgaaagagtactggaaagaacacacaatagtaggaatgctgatccgttggggaaaggaaaatcgtggagaagtacatgaaaagagacatttattgaagaaagcatggaaagatatgaaagcatttttgtatcatcaatacgaagcaattcttcagatggacctgcgggataaaggaaataaaggaatcctcagaatcgtaatcctgaactttcttctgctcttagtagtgaaattattttcttacagcataggactgataccattaattgtttattctatcattttattctttgtaatgaagaaagtgctaaatggaatcaagaagaaatatcagcttctgcttaaatcaacaaatcagcttgcagaaggacagctagatcttccaatcgaaggtgatgtcggaatcttccgtccgattcaggatgaattaaagaagattcagagcggattcaagaaggcggtggatgaagaagtgaaaaatgagcgtatgaagacagagcttgtgacaaatgtctctcatgatctccgtactccgctgaccgcgatcatcacttacattgaccttttaaagaatgaaaaagacgaagaaaagagaaaagaatatacagaagtacttgagagaaaatctcttcgtctgaaagccctgatcgaggatctctttgagatgagtaaggcagcaagtaagactatccagatgaattacatgaaagtggatctcgtaggactgatccgtcaggcggagcttgagaatgaggaaaagattagagaagcacatctggaattccgttggaaacttccggaggacaaagtagttctctggttggatagtgaaaaaacatatcgaatttttgagaacttgattgttaatattacaaaatacgcaatgccgcatacgagagtttatatagaaatgaatgagcggccggatgacgtgcagatttttatgaaaaatgtttccgcaggggaattgaatttcaatacagaggagatcacggaccgttttgtaagaggagattcttcaagaaataccgaaggatctggacttggcctggcaattgccaagagctttgcacagctgcagcatggaaacttgaatattacaacagaagcagacctgttcaaggcggagattatacttcctaaattggagatgagcgagaaaaaagaagattagggactggaaaatgttgtaaaagaatagtattcttagaatagatggaactttacagaatatgttaggaagaatgattcaggaggaataaaccatgagatatgaaatcaaaggtgatacccttccggtagtggtctgctatttggagaatggagaaagaatgattacagaacgcggttctatgagttggatgtctccgaatatgaaaatggagacaacttccaacggaggaatcggaaaagcatttggaagaatgttttcaggcgaggcactgttccagaaccgttatacagcaacgggaggtaatgggatgatcgcatttgcatccagttttccgggacagattgtagcacgccagattgcaccgggacaggagttgatcgtacagaagtcaggatttctcgcttcagaagaaggtgttgatctttctattttcttccaaaagaaattcggagcaggattcttcggcggagaagggtttatcatgcagagactttcgggaaatggaatagcatttcttgaatttgatggacatgtggtagagtatgaactgagaccgggacaacagattgtagtggataccggatatcttgcagcaatggatgcaacttgcagcatggagattcagacagtaccgggacttaagaatatggtattcggcggtgaaggtgtgttcaatacagttgtcaccggacctggacatgtatggcttcagacaatgccaatctccagcgtggcaggagaacttctgagatatatgccggctggaaaataaaggatgaaaaaaggacaggatactttcgaatgaaatgttagataaaatgaaagtgtcttgtccttttcactgcgtaaacagtaatgttttgcatatcagatagtgctaattatttactttctcaagattgcgcagatgcagatatacggtattcttactgattcccagcgcttcggcaatcgtgatgacggcatcctttagattaaagattccctgctggtaaagtcggaaaataatttctttattcttatttgtgctcgatattgctgaatccatcaacacttcttgacgaacggtttgaatggtctgctcaagaagatcagaactgctctgggaaaatgtctcatgaatctgaccggagactgtgagaccgtcagaatcagatggaatcggaacagcaaagttgcagaagaaatctgccattgttgtattcatataaaagttgatacagagcagtccgataattctgtccttctctcctttgataggaattgtagttgacttcagcggttctccttttacatttgtggaaaaataaataacaccatggtcattttcttcatttcgacggatctgctcgagcatcttcaacgcaaggtcggtaatcggtgcaccttcggtacgtcctgtgtgatatccgttgatgaccttgattgcagagtgttcataatcttccagactgtgaaggacaatctcgtatccatttccaagataattggaaagtccatcgagtgtctgacagtatgagtgcagaatctttttgtcaagtgaagttaattttaaatttccggttggcataatcatgcgtcctttctgtctgtgtgaaagatatccagttttgttcggtcaaaacagacaaatagtatattgatggttttattttatcatggatatgctggtttgtgtgaaaaagaagtcaatgaaaaatagttaagtgaatgaaattttattgactaaacgattttaacgttatataatttcattaagaacttataatttcaataaatcaggaggtagaattcaatgaaaacaatttcaacaccaaaggcaccagctgcaatcggaccatattctcaggcaaaggtagttaacggaatgttatacgcttcaggccagatcccgatcaacccggctacaggtgatgtagatgccacaacaatcgaaggacagacagagcaggttatcgctaacatcgctgctgttcttgaagaagctggatcaagctttgacaatgtcgtaaagacaacatgcttccttgcagatatcgctgatttcggagcattcaacggagtatacgagaaatacttcacaagcaaaccagctcgttcatgcgtagcagttaaggatcttccgaaggctgttctcgttgagatcgagatcttagctgttgtagagtaattcttatagctagtagagaaaatgaaaaaatgacactgcgctgtgaggcgaggtgtgaatagaaaaggagtccatggaaatgcgatatgtcgcataccatggactccttttgttactgttcacacaatgtgcgatcagcaacgcatctcgccattttaaatcgcctttggcgatggggcgagatgcattcaagccaaaacatgcatcctccgtgtcaatcagcgaagtgattgacacgggagtgaacagtaacctcttttttacttattcaaggaatctccccggtctacaacaacatgatatccgacagactccattctttgggccaggcagttcttgcactgtgccgattcatcaccggtgcagatcttgttatcataaagcagataatctttgcgaacatctgttggagaaaggtttggcataacgacattagctcctgcgagaattccctgttcccttccggtgggagaaatcgtaccgagagcggttgttgccgggaggagtactttcggcagcataagacggatcagtccaagcaggtaaagtgtcaattccagtgttccggcaggttcctcagcaaactgtgtgtcgtggtgagggataaatggaccaatcccaaccatatgcggattcaattcttttaagaaaagcatatcatcagcaagattctcagttgtctggaaaggtgcaccgaccatgaatccggttccaatctgatagccaatcgattttaaatcccacagacagttttgacggtgacgcgcacttaaggaagcaggatgaagcttacggtaatgtgcatcattataagtttcatggcgaagtaaatagcggtcagcgccggcatcgaataaagtctggtatgcatcatgttccatttctccaacagagagtgtgattgcacagtccggccagtttttgtggatgtcagagacaatatcagccagacgcggaaccgtgaaccagccatcttcaccaccttgaagaacgaaggtgcgaaaaccaagttcatatccggttttgcaacagttaagaatctcttctttggtaagacggtagcgatgtgcattcagattacttttgcggataccgcagtaataacaatcgttacgacaatagttagtgaattcaattagtccgcggacataaacattatgtccatagtgagtgattcgtactttgcgcgcattttcaaataaatagtcggcaagttcaggggttcttccgtcaattagccgaatccattcatttttagagagagtctgtgtatctcgtaatttatttatcaattctttcagatcagaagtctgtgatgtttcataattactcattcgttctcgaagccctccttcaaaaaagttattcccattataacacaggaagcagggactgtttaccgaaaagaactgtacaaggtaaaaaaatatgttagaataacggtagtgtacaacataaattgcttcaagggagtgatcagatatggcagaagttagaaagcacattgtttttcacggtcgtgtacagggtgttggattccgctatacagcgaaatatctggcgaattcactaaatctggttggctgggttcagaacgaatgggatggaaccgttacaatggaagttcagggacgggaatggctgatcaatgaactgctaaaagggctgaacaggaatcagtttattacaatcgactggatggacacagaagaaattccattagaggatgagaaaaaattctgggtgagagacggatacatgtagataaaaggttactggacacggttcttagaacagtaatggtaaaagaaaaggagacttaagatcatgaaattaggatttatcggaacaggaaatatggcaggagcaatcatgggcggaatcatcaaaaagggaattattgccccggaagagatcattggttcagatattatggaagcaggacgtgaacgtgcgaaaaaagagcatggaattcatgtgacagcagataatatagaagtaacacagaaagcagaagtattagttctctctgtaaaaccacagttctatgcacagacaattgctgagatcaaagatgcagtaagagaagatcagctgattattacaatcgcaccgggcaagactctcgcatggctcgaagagcagtttggaaagaaagttaagattgtaagaacaatgccgaatacaccagcattagttggagagggaatgacagcggcatgcccgaatgatgcagtgacagaagaagaaaagaactatgcactggagcttcttagttcttttggtaaagtagaaatcgtgccggagcatttgattgatgcggttgttgcagtcagcggaagttcaccggcgtatatctttatgatgatcgaggcaatggcagacggagcagtagctgagggaatgcctagatcacaggcgtatcagttcgcagcacaggcagtacttggaagtgcaaagatggtactcgagacaggaaagcatccgggagaactgaaagatatggtatgttcaccggcaggaacaacgattgaggcagtacgtgtacttgagaaacttggatttagaagtgcagtgatcgaggcagagaaagtctgtgcagatatgtccagaaatatgtaagaagtgattgaaacatattacagtttagcgtaaatgaaaaaatgaattacaacaatcagaaaatgtagaaacagtttgttgggaaaggggaaatatgggaatttatgatattggaatcatcggtggcggaactgcagggatgactgcggctatctatggccagcgtgcaggaaagcagaccgtactcttcgagggaacaaccttcggcggtcagatcacattttctccgaatgtagaaaattatccgggaattgcaagtgtgagcggcagtgaattctctatgaatctgatggatcaggcagtaaagctgggaacacagaccataatggagcaggtgacaggtatccgtgaagaagcggattataaagtgattgtaacaacggaaaaagaatatgaatgcaaaagcattattcttgccactggtgtgacacaccgccatcttggagttccgggagaggaacgtctgacaggtgcaggagtttcatactgtgcgacttgtgatggaatgtttttccggggaagagaagttgcagttgtcggaggtggaagtacagcactccaggatgcagaatttctgtcaaattactgtagcaaagtttatctgattcacagaagagacgaattccggggagaagatcagattgtaaaacgtttgcaagaaaaagaaaatgtagagtttatcttaaatacaactgttcaggaaatccgtggagagcagatggtggaaagtctgcgggttttgaataaagtaacaggagaagaatcagaacttgctgtttccggaattttcgtagctgtcggacagattgcacagaatgaaaaatttgctgatgttgttcagttagatgagagtggatttattgttgccggagaagattgcaagacgtcagaagcgggaatctatgcagcaggagactgccggacaaaagaagtgcgtcagcttacaacagcggcagcggacggtgcagtagctgcacttgccgcatgtaaatatatagcagatgttgctgaaaaataagattatgatgttttaagtatgtaattgcaattcgtaatctacaaccagacagaaaagaaaaaacaagtaccacaattagtagttactgattgtggtacttgtctgagttagaaacaaacattcaatattaatctacgaacatcttcattcccatccattgtttcatatgttcaatcatcttttcatcaggttcaatataaacacaagtcattttctgattgattgggatcatgattgcgaaaacctttgcatttgcatttccggatgaaaagtcgcaagttgtttccggatgataagaatccagtcgatgagatccttttggtgcaataatctcagcattctgaatatccaggtttattttggattttcttttctctttgctgtaaattgcatcaatatccagatcgtgattcagaagggaatattcatactccacatttaagagtggaaatgcaaaataataagcaagtaaagccaggattgctgcaagagcaaaagcaaagaatccaagaaatggcattcctccgattgcgattgcaacgatcacaacaataataagaacacggataacaaaatccattggttttgattttctagctacaatatgttcacataatgcgtcattcataagttataagtcctttcttatatattatatattatatattatatattatagtaactgttcagagtcaacctccaaaatgctacgcatttcgtcggtgtggcgtatccgccaaataaaatttcaaaaacagtcttaaaaatgcaagcattttacacctgttttatgaaattttgcttggctctgaacagttacacattatatatcaattacacctcagtgcaatttttttctttttcagcatgaagatagttcatgaccattgttgcaatcttaaatgtcattgcatcttcgaattgccttaagtcaagtccggtacgcttttcaatctgctccagacgatagatcagcgtgttacggtgcatatgaagctggcgtgaagtctcagcaatgttcagattattctgaaggaaacggttgatcgtcaggagtgtctcatcatccagcttgtccggaatcttgtctaagaaaacttcctggagaaagctttcgcacagtgaaacaggaagctgataaatcaggcggccaatccccagttcattgtatggaaagacagtctgttccggatagaaaagttttccaactttcagtgcaagacttgcttcacgaaaagccccggataattccaaaagagaaggaatcatctgactaaaagaaacctgaacatgtgcaagagcttccgcattcagcgtgtcaacaatcgcatgagccagatgtcttgcatgttcatcagcagaatctttggaatcctttgtctcatgaaatggatataatacagccagtcgctcttttgaaacaggaatgatataagcttttgtctgagaaggaaacagatttttaaggatctctgcaacaatctcgtcaggttctttcatttcaatcaaaaagagaattcgattttcttccggtgcaatgtggagccgtgcggcacgctgctgtacatcgtaggaaggaacaccgccggtcattagtcccataagaaaatcatttttattatatttttcccggtaggcaaggcagagacagcgaatctgttccagggccatctgctcctgttcagaatctttggcagtcactgcaagtgtgattccggtcaaacgttttaattcattgagtcctttttcaagttcggatgtattagccatagtaatctccgtaaataaaataataatagatggaagaaaggctgcaccttccgagaaaagtacagccccctccgtgtttagtttaattgtaaaggattagtttgtaatagtcaactctgtgtctttgtcaaagagatgaatcttttccatatcaagtgcaaatactgcatgatctccagttctgagtgttgtacgtgggttaacacgtgctgtcaactgagttccctcaacatcgaagtacaggaatacttctgctccaagcagctcgtaaactttgattgtagactcaattacgctgtcaggagagttactgataaatgcctgtgagtcatgtacatcttccggacgaataccaagaacaactgtctttctgtcatatccgccatcaatcagtgcctgcttcttagaagccggtaccttaagaacatgttttccaactgtaagagtaacatcatttcccttaattgtacattttgcatccatgaagttcatctgaggtgatccgatgaatcctgctacgaacaggttgcatggtgtattgtaaagtgcctgtggtgtatctacctgctgaacaactccgtctttcataacaacgattcttgttccaagtgtcatagcctctgtctggtcatgtgttacgtagatgattgtagcacccagattctcatgaagcttggaaatctcgatacgcatctgaactctcagtttagcatccaggttggaaagtggctcatccataaggaataccttaggattacgaacgatagcacgtcccatagcaacacgctgtctctgtccaccggaaagagccttcggtttacgatcaagcagtttgtcaaggtcaagaatcttggcagcctcacgaaccttcttatcaatctcatctttcggaactttacgaagtttcagtccgaaagccatgttatcatatactgtcatatgtggatacagagcgtagttctggaataccattgcaatatcacgatcctttggctctacatcgttcattacttttccatcgatcttaagtgtaccgccagagatatcctccagaccagcgatcatacgaagtgttgtagatttaccacatcctgatggtcctacgaagatgatgaactccttgtcagcgatttcaagattgaaatcttttactgcgtgaaatccgttaggataaattttctgaattccctgaagagataaacttgccattataagtgcctccttaaatgattattttttacttgtttgactaaatttggttttgttttttaattggtagttgattttggtttgtttaacttatgtacttagtatagcgttaggcacgaaaatcaacaatgtcacgagtgactaaaaaaaggaggggaaagtgtacatttcaaccatatgaagaagaatgatggttgaagttatgaaataaatccgctacaataagactattcacagtgtatagaaaactgcgaacgattattatagaagaaaagaggaattaaacatggcaaatccagtagttacatttgagatggaaaatggcgatatcatgaaagcagaactgtatccggaagtagcaccgaacacagtgaacaactttgtatcacttgtaaaaaaaggcttctatgacggagtaatcttccaccgcgtgatcagcggattcatgatccagggcggagatccggacggaacaggaatgggtggcccgggatactcaatcaaaggtgagttcgcgcagaacggtgtagagaacaaccttgtacatgatgcaggagttctttctatggcacgtgcaatgcatccggattcagcaggaagccagttcttcattatgcataagaaagcaccacatcttgacggagcttatgctgcatttggtaagatcacagaaggaatggatgtagtgaataagattgctgagacagcaacagactacagtgatcgtccgcttgagaaacaggtaatgaagaaagtaactgttgagacattcggagaggattatccggagccggaaacagtatagttcataaaaactttatacttttaatggaattattagcactcttttgaaaggagtgctaattttctattgacttttaaattttgctgtactagaatgtccattaggcaagcaaatatactatcgatatcagcgaaaaagctgattgacagccgatattaaaagaaacgtaactgagcagttacggatagattataaataaaaaggagtgcagtaaaatggcagttaaaaaaggtactttatcaattgacagcgaaaacatttttcctattatcaagaaatgggtttattccgatcatgatatctttgtacgtgaactcgtatccaacggatgtgatgcgatcactaagttgaaaaagctggacatgatgggagaatatgaactcccggaagattataaaccgaagattgaagtaattgtcaatccagaagagaagacaatgaagtttatcgataacggacttggtatgacagcagaagaagtagaggagtatatcactcagatcgcattttcaggtgcaacacagttccttgagaaatataaagataagacaacagacgatgagatgatcggacacttcggtcttggattctattctgcattcatggtagcagacgaagttcagattgatactctttcttataaagaaggcgcaaagccggtacactgggcaagtcagggcggtacagagtatgagatgcaggaaggaaataagacaacagttggaagtgagatcacactgttcctgaatgaggatagtcttgaatttgcaaacgagtaccgtgcaagagaagtgcttgagagatattgttctttcatgccggtagagatcttcctctccaaggcaaatgcagagccggagtacgatacaatcgatgaggcagatgttcttgatacagatactgtagtagagcatattacagaggaaccaaaggaaggcgaagagggcgagccgaagcagaaagcgaagattgtaagacgtccggtatctatcagtgatacacacccactttggacaaagaatccaagtgagtgcacaaaggatgactatattgatttttaccgcaaggtgttcatggattacaaagagccactgttctggatccacctgaacatggattatccgtttaacttaaagggaatcctttatttcccgaagatcaatacagagtatgattccatcgaaggaaagattaaactttacaataaccaggtatttatcgcagataatattaaagaagtaatcccagagttccttatggtacttaagggagtgatcgactgtccagatctgccgttgaacgtatcacgtagtgcactgcagaacgacggatttgtaaataaagttgctgattacatttccaagaaggttgctgacaagctgaatggaatgttcaagacagaccgtgagaactatgagaaatattgggatgacatcagtccattcatcaagttcggctgcctgaaggatgagaaattcggtgagaagatgaagaattctatgctttacaagaatcttgatcataaatacatgactctcgaagatatcatcaaagaagccaaaggcgaagaagctgatgcagccaagacagaggaagctaaggcagaagaaacaaaaacagacgcagaagagtctaaggacgcagatgcgaaggaagaagagaagacaagaatcttctatgtaacagatgaagtgcagcagagccagtacatcaacatgttcaaggcccagggacaggatgcgatcattctgacacataacattgattctgcatttatcacataccttgagcagaaacatcaggaagttcagttcttgagaattgatgcagatgtacatgattctctgaaggatgaagttgcagaagatgagaaggaagaattccagaagacaacagacagccttgttgaaatcttccgcaaagagcttggcaatgagaagcttgatgttaaagttgaaaagctcaaagatgagaatgtagcatctatggcagttctttctgaggaaaacagaagaatgcaggagatgatgaagatgtatggtatgggcggcatggatgcatccatgttcggaagccaggcaacactggtactcaatgctaaccatccacttgttcagttccttgtaacgaacaaagacagcgagaacgtgtcaatcatctgcaaacagctgtatgaccttgcaatgcttgctcataagccattaagtccggaagagatgacagcattcgttaagagaagcaatgatattatgatgcttctgacaaaataataaagtaaaatgatgagaaacatgttctatgagtttctcatcatttatggtaataagttcagccgcttcacgattatttgaccgtgaggcggctgttattatgtgcgccttgcggcgcacatcgctaatagatttttaaatttacatcaactcaaattcaatctctttttttaaaaagaacttctttaccatctcatcccattcgcgttccagggtcttatccatcataaaactcttgaaggaagttccggttacgcaggtgagatgagttccatcgtaacgtatattcaaatagagtccctgcacgtcagcaggattaagtcccagttctttctgttcaatcagacgggaaatattctttgaattcaggctgaagataaaatgaaaaccgagcggtgttttctttcccttaattaaggaaaaacaaaattcacgcagatttttccaaagagaatattccggaatctcttcttcagaatcaaagaaatctttctgcatatacccgtcaatccgaaaggtattaaacgtaataatctctccttcaataaaagagaaattgtcaaatgtctcttttaacagaaggtgagacatgaagttttttacatttgttaaagtcagtgaaatcatagaaatcagatacctccgcagctgtttaagttcttaatcgtctacctatcattgtactaaaaggaatggcgagatacaagcgcagatttgttgacttttattgctaaaaaatgtactattaaaacagtatgggattctatacagtatataaaaaacagaaagaatatagatatatgaagaaaacaataaaaagaaagcaaaaactgggaattcggatcggggtcggatgtgcgctggtcattacagtgatacttctggcagtgcagggtgttagcaatctgacaaagaagccagtcgacaccagtgaaggaattgcatatataaaaggcaaagaatctgcagatgcgaagacgattgagcagaagattaatcagttggaaaagaaagatggaacaggagattcatccgatacaagaagcatgaaggaacgcttttccggtgctgttgtgatgggcgattccattgcggcgagctttacagagtatgatgtactgaatacatcaagtgttgttgcgaaaattggaattcatttcagcgaactggatgatcagatcgagcaggcaaaacaactggatccgcagattgtttttctggcatatgggatgaatgatgtaactaagacaaacggagatgtagacaagtttatcaaggattattcagatgtgattaagaagattcagaaggctatgccggatgcgcatatttttgtgaatgctgtttttccggtgcaggaaagtgcggtagagaaggagccggcacttgcaaatatcgcagattacaatgaaaaactagaagcgatgtgtgaaaagaagcagatcggatacattgataattcagatattatagaagatgagtactatgaagaagatggaattcattttaaggcgaatttctatccaatctgggcagaaaagatggcggaggtggcaacgctatgacagagaaaagacagcgaatgatctctgcgatgaaatatatacttttagtaattatcgtgggatatcttgtgatattgatgctatatgcaagtggaagtaagcgggctttttcagaagtatcaaaggctctgagcagtgtattggacagtaaagaacttgtgcagatggatgaccagatgctcaagagaaattatggactgaacagtgcagattacaagggtgttttgtattattcttctccgtccagtatttcagcagcggaagttctggtgatacaggtgaaaaatgatgcacagatagaaaatgtgacaaatgcgatcgcacagagaaaagcacagagaatagaagattttgattcttacctgccggaacaggtgaagcttttagaggactcacaggaaagtattcgtggaagatatatcttttttgcagtatcttcgaaagcttctgaatatcgcagcgcatttgacaagagtctgtagaagggggagcagatgttatttagtagtattacatttttgtttttatttctgccgatcatgctggcagtttattatattgcaccgccgcaatggaagaatctcctgctgcttgcaggcagtctgattttttatgcctggggtgaaccggtttatatcattctgatgatactcagcattttgttaaactatttttgcggaatggatattgagaataagagtgagaatgaggcgaaagcaaagcggtcactggtctttgcaataacagtaaatattgtgctgcttgtgttctttaaatattttggatttttggtagaaagtacgaatacgttgttcggaatcagtattccgtacagggaactggcattaccaattggaatttctttttacacatttcaggaaatttcctatattgtagatgtatatcgaggcaaggtaaaagcacagcagagtctggtgaagtatgcgctgtatgtatccatgtttccgcagctggttgccggaccaatcgtctgttatggagatattgagaagcagcttactgcaaggaaaatctccggaagaaagttgggacagggcgcgatgctctttattattggactttcgaagaaagcagtgcttgcaaatacactgggaaagatttttgaagaaatctcatcgacatcagcaagtaacctgacagttctgatggcatggcttggatgtattacttatgcattccagatttattttgatttcagcggttattcagatatggcaatcggacttggaagaatgttcggttttgagtttaagaagaactttgatgtgccgtatatttctaaaagtattacagaattctggcgcagatggcacatttctttgagctcctggttccgtgaatacgtatatattccgcttggtggaaatcatgtgacgatttcaagaaatattgtaaaccttttgattgtctggatgctgaccggaatgtggcacggagctgcatggaattttattgtatggggaatctattatggagtagttctcgtactggagaaatatgtctggggggcaatcgtggatcggtggccaagtgtattgcagcatatttatgcattagtactggtgctggttggctgggtgtttttctttagtccaagccttggagcagcacttcgttacctctttgcaatggttggcggcggagcaggatttgccagtaaagaagtattctttgtgatcctgacacactggttgttctacttgttggcagtaattggatcaacaacacttggatcaagaatgctccgtgcaatcctgaatgtgtctgagaatcatacagtacggactgtaatcacactggttgttttctttggaatgctggcaatatcagttgcttatctgatcgcagatacgtacaatccgtttttgtactttagattctagagagttatagaaaacagtgaacgacaacaattaaggtgaaaagatgaagaaagatagacagagaaaagtacaggagaaattggttggtattatatttattctgaccttgtttctattccttattataaatgttattgtgcctgacagagaaaaatcagtgcaggagaaccgtatgcttgcaacgaagccaaagtttcgcctgagcagtctgataagcggagattatgatgaaaaatttgaagcttatatggatgatcagtttgttggaagagacatgtggagaaagctgaaagttacggtggaccggattggtggaagtcgtctggaaaacggtgtctatatcggaacgaatgggcagcttttagaacagattgaagttgcagatgagaatcatcttgccgcaaatattaaggcaatcaaatcattttcagagagtcagtccaagattccggttcgtatgatgcttgttccggatgcagcaaatgtattgaatcattcccttccggcacttgcgaagccggaggatcagacacagatgttcagtatggttcgtaaggatcttggagatagcgttgagtggattgacgtgtcaacggaattgaataaacataagacagagaagatttattacaaaacagatcatcactggacgacacttggtgcattttatgcatttcaggcggcagcaccatcccttgggattgaaggagatctttcaggaaactatgtttcctacgcagtttcagacagctttaacggaatgctggcatcaaaaagcggagtgaatcttggagagaaggaacagattgatatttatgtgccgacagaagaagatacagacttgatcgtggattacgtggatgaaggaaagcgttccacatccttatatgattcttctaaattaaaggagaaagatcagtatacggtatttctaggaggaaattcatcccttcttgatatccgtacagtttctacaagcacaaagcgtcttctccttgtgaaagattccttcgcaaattcatttatcccgttcctgacaccatactacagagaaatcgtagttgtggatccgagatattacagcggaacgatcaatgatcttatggattcctacagaatctcagaggttctgtttttatacagtggaaatacatttttcaaagacaataatataagtggagtgtttgcagttgagtaatcgaatcaaagaagaatttttacagaagagtgagccggtaaggctgaataaatatttgagcgaggcgggcgtgtgttccagaagggaggcagaccgcctcattgagactggacgcgtgacagttgatggacagcgtgcgcagaccggtatgcgtatcgtgccgggacaggttgtgaaagttggaaataaagtcgtttccaaacaggacgagatgatcgtgctggcagtgaataagccgcgcgggattgtctgtacagaagaacgcagagagagggacagcattgtccgtttcctgaattatccggtgcgtgtgacttatatcggacgacttgataaggattctcatggactccttctgatgacgaacaacggtgatatcatcaataaaatgatgcgtgcagccaataaacatgagaaagaatataaagtaactgttgataaagagattacggaagacttcttaaagaagatggcagcaggagttccgattcttgataccgtaacacgtccgtgtacagtgaaaaaaatcggtaaatatacattttccataatcctgacacaggggttgaaccgtcagatccgcagaatgtgtgaagctcttggatatgaagtgaaggatcttttacgcgtccgcgtgatgaatatcacactggatggattgaaggatggacagtacagaaaactaacagatcaggaattgaacgaattatatgatcagctgaaagattcttctgcattgcccggtggaaaatatcaggaacagtgggcagcaacacaagataatagaacgagacatgggaaagggaagaagtgatgatggatgagcagaaagaaatgaatcacatgcgagaactggtggaacttctgaacagagcgagacgttcttatgagcaggaaaatacagagatcatgagcaactacgagtatgacaagctctatgatgaactgcaggagttggaagagaagcttggcacgagaatggcaaacagtccgactgtaaatgttggatatgaagtactcagtgagcttccgaaagagcgtcatgagcgtccgatgctttctctggacaaaacgaaagatgtagaaaggctgaaggaattcctaggcggacaaaaagcattaatctcctggaaactggatggacttactgttgttctgacctatcagaacggagaacttgcgaaggcagtcaccagaggaaacggagtgatcggtgaggtcattacaaacaatgcgaaagtatttaaaaatgtaccgcttaagattccatatcagggagaacttgtactgcgaggagaggcagttatttcctataaagatttcgagaagatcaatgaagagattgaggatgtagatgcgaaatataagaatccacgaaatctttgcagcggttctgttcgtcagctgaataatgaaatcactgcaaagagaaatgtaagattctacgcatttacactcgttcgtgcagaaggcgtggatttccagaattccagaaaatatcagatgcagtggcttgaaaaccagggatttgatgttgtggagaaccatgaagtgacaagagatacgattgaagaggaagtggcatggtttgcccgtgagattgagcacaacgaagttccgtcggacggtcttgtgcttgtgtatgatgatattgcttacggacagtcccttggaacaacagcgaagttcccaagagattcctttgccttcaaatgggcagatgagatccgcaacacaaagctgcttgagattgagtggagtccgtcacgaacaggtctgatcaatccggtggcggtttttgagccggtagagcttgaaggaacgacagtcagccgtgcaagcgtccataatatcagcatcatggaagaacttgaacttggtgttggagatgagatccaggtatacaaggcgaacatgattattccgcagattgcggagaatctgacaagaagtggagtgaaagatattccaaaagtttgtccggtctgtggaggtgagacgaaaatctctatggaaaatgagacaaagacgctgtattgtaccaatccgaagtgtcaggcaaagcatgtgaagtcctttgcactttttgcgagcagagatgcgatgaatattgagggtctttcagaggcaacactggagaaattcattttccacggctatgtgaaagactttacagatctcttccatcttgataactacagagatgagatcatgacaatggatggctttggcgaaaaatctttcctgaaactgcagagcagtattgaaaaggcaagaaagacaacacttgcaagactggtttatggtctcggaattccgggaatcggaagtgcgaatgctaaggtaatctgccgggcacttggaaatgattcgcaacgcgtgcttcaggcagaagaggcagaactggttgagatccagggtgtcggagcagtcatggcgaaaagctatgtagattattttaaagaggaagagcatcaggaaatctttaagcgacttcttagcgaagtggaattagaagaagaggaagtaacagaagacagccagaaattcgccggagtgaactttgttattaccggaagtgttgaacattttgcaaatcgtgcagaggtaaaggctgagattgaaaaacgtggcggtaaggtgacgggaagtgtcacatcaaagacaaattatttgatcaacaatgacgtaaattcaacatcttcaaaaaataaaaaggcaagagatctcggagttccgattatttcagaaaaagattttctggaaatgctgtagagaaattgttgccgggaacaggtactttgaattgtaatatgaaatgactgggagatgatagcgtgaagaaaaataaattctatccgttgggtggaaccacggtattccttgtggatcaatgggcaaagcactatgtggaaaagaatctcaagatgggtgaaaagaggaaactgacagagaaactggaacttcgacgtattcataatccgggaatctgtctgggagtatttgcgaataatccaaagaaagtgaaaaagcttacagaagtgggaacaggtattgtgacagtgatacagatgctgacacttctagggaacagcaatattttaagaaaaaccggaatcacacttgcggcagcaggtgcttggagtaacttaacggaccgttatcagaaagagaaggttgttgattacatcggagttaagacaggaaaggaaaagttggatcaagtaacatataacctgggagactttgcaatcggagcaggcggagtactctgggttcttggttctatgtttaagaaagaaggaacagaattatgattcaggatatacagccacatcagtttgataaccagtacagaccatgccctccggatgcacagagctatgcattgtattacgaaggacaaagtgcactgctgaagaaaaggaaagatggaattgattttccacgattccgtgacctggaacggcttaatgaagaaatttatgaagaagcagtttatctgtttacgattgacgaggaacgcttttatctggtacagaatattagtcgtgaacggttgtcagagtttacaatggagaataaagaatctttccgttatgcagaaccgcagtatcttgcatttgccggaattaccggttatcagttgaacaactggtatcgtaatcgcaagttctgtgggcgttgtggacatcggatgagacacgatgagaaagaacgtatgatgcgttgtgaccattgcggtaatatggaatttccgaaaatctgcccggcagttatcataggagtaactgatggtgacaagattctcatgtcaaaatatgccggaagagcatacaaaaaatatgcacttcttgcaggatttaccgagattggagaaacaatcgaggagactgttcagcgtgaagtaatggaagaagttgggctgaaagttaaaaatattcgttactataaaagtcagccatggtctttcagtgatacgctcctgatgggattctattgtgatctggatggtgaggaagaaatcacactcgaccgcgaggaactggccttggcagaatggttccgaagggatgagattccggtggagccgagcagagacagtttgacgaatgaaatgatcattaagtttaaaaatggtgaagtgtaaaactttcttatgaacagttacaaaatgtgaataaattcagtaagaaaacggaaagatgtgaatatctctgagaaattcatatctttccgttttgatatacttgtttaattgcgtgatattgcagtaataacagttaagcttcgggacatgtgattttgatcacctgctcgatcatatgatgcaacagctgtgcctggtttgtgtctgctgctttgtagtaaacttctttcccctctctgcggcttgtgatcagtccgtaagatttcagctggcggagatggtgagagacagccgggctactcatgtccatcatggaagaaatgttgatcacacattcttcgcagtggcagagaagccagaaaatgcgtaccctgctgttatctccgaggaccttgaacaggtcagcaacaatctggaagtcctccgtctttgcaatattatctataagaagttctgtattcagatgttcaccatgattatgtggtaaaatatggtcagtcataaacaatctccttttattcggtattgaaattcaatagcgcctttggcaactctataatcataaaggtattgtaacataaaaataccaaaatgtattgactttttcatttggttggctataatgtaaatataaagattaaacgaatgcttaatcgtttaatgaaaatgaataggaaacatgtttgatgaaagtcaaaaaacaagatcaaaggagaagagaaagatgaagaagacttataagattgaagtggattgtgcaaactgtgcaaataagatggaagatgcagcaaagaacacagcaggtgttcagaatgcaacagtgaatttcatgacacagaagatgatcgttgagtttgaagagggacaggatgcaaagagcgttatgaaagacgttctgaagaattgtaagaaggtagaggacgattgcgagatctacctgtaagagggtgagaagaatgacgaagaagcagaagaagatgctgaccaggatcatcgctgcggcggtgctcctgattctattgaatttccttccggtaacaggaattatcagatttgtattatttttgattccatatctgatcgttggttacgatattttgaagaaagcatggaagggaatcttaaaccgtcaggtatttgatgagaatttcctgatggcagtcgccacggtcggtgcgattgcgattgcattttatgagaagtccggagactttaatgaagcggttgctgttatgctgttttatcagatcggtgaacttttccagagctatgcagttggaaagagccgcagaaatatcagtgaattgatggatatccgtccggattatgcaaacatagagcaggatggaagtcttgaacaggtggatccggatgaagttgaaatcggaacagtgatcattgttcagccgggagaaaaagtgccaatcgacggtgtggttgtagagggaacctctacactgaatacaagtgcgttgaccggtgaaagcgttccgagagaagcgaaagccggagatgagatcatcagtggctgtatcaatctgacaggtgtgttgaagatccgtacaacaaaagagttcggagaatcaacggtatccaaggtactggaactggtagaagaatccacatccagaaaatcaagatcagagaactttatttctaaatttgcaaaatattatacaccggcggtatgctatggcgcacttgcacttgcagtgcttccaccacttgtgagaatgtttgcaatgggagctgcaccgcagtggaatgactggatctacagagcactgacatttcttgtaatcagctgtccgtgcgcgctggttatcagcatcccacttagctttttcgcaggaatcggcggggcaagccatgagggaattttggtgaaaggatccaattatctcgaggcactgtccaagacaaaatatgttgtttttgataagacaggaactttgactcagggaatttttgaagtggtcggagtacatcataatcagatggaagaaaagcagctcttagagtatgcggcacttgcagagagtgcgtcatctcatccaatcagcaagagtattcagagggcttacggaaaagaactggatcgttcccgtgtcagtgagatagaagaaatcagtggaaacggaattacagcgaaagtagacggaagaagcgttgcagcaggaaatgttaagctgatggatcgtcttggtattccatataaatcatgtcataaagtaggaacaatcatacatatggcaattgatggcgaatatgcaggacacattgtgatttcagatgttgagaaaccgacttctaaagaagcaatcgcgaaactgaaacaggcaggaattcagaagacaatcatgttgacgggagatgcgaaacaggtggcagaccaggtggcagcagatcttggtattgatgaggttcatagcgaactgcttcctggagataaggtggagcaggtagaaagacttctggctgagaagccggcgaaggcaaacctggcatttgtcggagacggcattaacgatgcaccggttcttggaagagcggatatcggtattgcgatgggggcaatgggatccgatgcggcaattgaggcagcagatgttgtcctgatggatgatgatccgttgaagattgttaaggcaatccgaatttctaagaaatgtctcggaatcgtatatcagaatattgtatttgctctcgcagtaaagggcgcgtgcctgattctcggagcacttggaattgcaaatatgtggctcgcaatctttgcagatgtgggagttatggtacttgcaatactcaatgcgatgcgtacactttttgtgaagaagttataaaaagaaaaggatgaatggtaaatgtgagatacattaccactcatcctttttctaatgacttaatcagtaaaatcttatacagctttcaggaactgtacgctgtaagctggcattgtcagctgtccgtttaaagttacagtttctgcttcgtctgtatttacaagcagttctgtgaaagtgccctgcagttcaccatttccggcagtaaattctgaatcaccggcattgatcgcaacgagaacacgttcattatcagtgcggcgttcaaagatcagctgatgatttgtaatgacaacatttcggtaagaaccattgcaaagagcatcactgtttctgcgaacttcaatcaattctttgatgaaatcagtcagttcattcggcttcggctcttcgaagcatggacgaagtgcatagtcattatccggtgctttcacaccttcctcgccccattcacttccataatagatacacggaatacccggcataccaaagagaagaccgtaagcaagcggaagatgattcttgttcgtcaggatacttgcgatacgtgtgacatcatgattatctacaaatgtcatcaaatgctttccacgataaatgcaccactgctccggtccgaactggcgattcagagaatgtgcgatctcaaacagattcatgcaattgaagcttgaaaaaattcctttgtagcattcatagtttgtacagctgtgaagcatctcgtcgtttacgattaagttgtagtcgccgaagagaacctcaccgatcagtgcaaatcccggtttcagttcctcgcagaagctgcgcagacggcgcatgaaattatgatccaggcaataagctacatccagacgcagtccgtctatgccgaactcttcaatccacatcttgacacagtcaagcagatagtcgacaactgcaggattctgcagatttaatttaacaagttcaaaatgaccttcccatccttcataccagaaaccatcgttatacgcactgtttccgtcgaagctgatatggaaccagtctttatacggagagtcccatttcttctcctgcacatccttgaatgcccagaagccacgtccaacatgattgaatactccgtccagcatgatctttacattgttatcatgcagcttttcacagacttctttaaagtcttcgttcgttccaagacgacagtcgatcttgcggaaatctcttgtgtcatacccatggttgtctgattcgaaaatcggattcaagatgattgaaccgattccaagatcaccaagatattctgcccattcaccaattttaagaatccggtgttctgttactccgtcattatgtaccggagcaccgcagaatccgatcgggtagatttgataaaaagtttcattgtaagcccacatagttgttacccactttcttgattcggatttttatcggatttcgataaagagtcagagatataaaaatctcttaaaacctatttctaattataacataagttgagcgttttggtgaaaaagtttaaagagatagaattgcatttacgagaaatacaacgtatactaaaattatcgaaataacaggaagatactggacggatgatacagaaatatggaagattcaaaggaggatatcatgggagaagagatataccagaaagcactggagtatgcgaagaagaagcatgaaggacagtttcggataggtggagctccttttattgtacatccgattgcagttgcagagattcttcgacaggatggtaagcaggttgaatatcgggttgcggcagtatttcatgatcttttagaggatacagatgcttcagaacaggagattgtagaaatcgggggagaagatgtcttaaaagcagtgaagctggtgacgaaggaaaaagaatattgtatggagacctatattgcagggattaagacaaattctatggcatatgcagtgaaaggggcagatcgtcttcataatctgcagagtgcattctgtgcaaatgagaagtttcgcaagaaatacatccgcgagacgcttgactggtatatgaaattcagaccggagatcccggaagttgtagcagaactgattgaaagtttgaatgattgtgaagaaaagcaacaatttcgtgaggaagtaaaagtattttaaatagatcaaaaagattaagatttttttagaatacaaggcttatgttgcgaaatgaaggttgaaatggtatattaaattagtattcatgggctgttaagcgtagaaattgcgtttggcagtgccattagaaagcgacagatagaaacatagagaatgatttacagggaaggaaactaaagaatatgagtcagcaggacaaaagatctcggcgcaggagaccttctgatgaaagaaatgatgtgcgaagaaagaaaagacattccaatagaaaaaatacatctgacagacatcgccgaaggagaaaggtgaaaaagagagagaataaactcagcagaacaattggattagttctggcaattgttcagcttattgcgacagggatttttatggcaggcatatttaaattgaatatgcttccgacaaagtatgttgttgcagcaactgtagcattggtgctgttttggggagttattctggcaagccagttcttttccaagaaaaatgcgattacaggaaaagttatcagcgtattgattaccgtattgttgatttttagttcgtattatctgttcaaggtaagtggaacggtttccaaaatctctggtggagagtataaactagataaagtagttgtatctgttatggcagatgattcagcagaggcaatcaaagatgcaaaaaattacacatttggtgtacaatataagatgaatggagatcagattaaacagactgttcaggcaattaatgaagaactcggaacggaaattaagacagaagagtatgatacattggcagaacaggccgaggctcttcatgatggaaaagtagatgcgattatttataatcagggatttacaggagttcttgaagaagcatttgaagggtatgaagataatacaaaagtgatttattcccatgacattaagactgagatagaagatacctcatctgatgttgaagtgaaaaatgatacattcagtgtatacatcagtggcattgatgtttatggagcaattgagacaaacagccgaagtgatgtaaatatcatagcagaagtaaatccaacaacacaccagatcctgcttgtgaccacaccgcgtgattattatgtcgaaattcctgaggtttcaggtggacagaaagataaactgacacatgcaggaatctatggcgtggataagtctatgaagacattagagaagttatatgatacgaatcttgatttctacgcgcgagtaaactttacctccctgatcacaatggtagatgcacttggtggagtagatgtagaatctgagtatgcctttacaacaagtgaagattcaggacttgtgatggatgttgtacagggaaccaaccactttaacggaaaacaggcgttagcattttcgagagagcgtcagaatgtaccaggaggagataatcagcgcggtaaggatcagcaggcggtaattacagcaatgatcaagaagatggtatctccggcaattttgacaggagcaaatggaatcttgaacagtgtaagcggaaatgttgaaacgaatatgtctgaagctcagattcaggaattgatcaaaacccagctttctgagaacccgcaatggacaattacatcaatggcagcagatggaacaggagacactcagtattgttattcttattccggtaagcctttatatgtaatgcagccaaatcaggagtctgtagacgcgatcaaagaagctatggataaagtggagaacggagaaactctggaaggcggaacaacaacagagtaatagacaacgagagaaacccgcaggcagaaatttgtctgcgggaatcgtgatgttatagagaaaagatgattaaggataatgatatgagtaagacacgcccattatttacagttgtaatgccggcatatggagtagaaaaatatcttgccaaagcggtagagagtatagaatcccagacatttcaggaatgggaattaattatcgtagaggatggatctccggataaaacaggaagtctggctgagaaattaaaagagaaggatgcaagaatccgggtgatacatcatgaacagaataaagggctcagtgaagcaagaaatacagggattcaacatgcaaccggaagatatatctggtttatggatccggatgatacagtagacatggaccttttacaacaagtggcagattctttagaaaaaaacagagcaaaacttgttgtttttggacatcttgaagaatattacaatgaagatggaagctttgcttatgcccatgagatccggccagaagaaaaatattttacggatattgaagaaatccataattatatgatccgattggaacaggagacgatttatggttatgcgtggaataaagtgtatgatctggactatatcaaagaaaataaatttcgctatgaaacggtcagattgattgaggatatcgtatttaatattaattattgtaatgatattgattcaatgaatttattgaatattgcaccgtatcattatgcgaaaagaatgacaggaagtctgacaactaagtttgtaccggattattatccgcttcacagaagacgtattgaaatgttactgaatcagcagaggtattggagagtagatacgcctcaacacggtgctattcttggaggactgtatggaagatatattctttcagccttagaaagaaattgcgatcatcagtcaggaatgaactcaaaagaccgaaagcaattttgcagggaagtattccgggatccgctgtttcagcagctgcttccaaaagcagaagcgaaggacagtaaggcacttaagattactttaaaatgtttgaacacacattccacatttttgtgtacagcacttggaagaatggtgcatattgtgcgaacaggaatgcctgtgatttattcaaagacgaagtcggagagatagatcatagaaagaaatatcaagcgggagaaaaataatgtataaagtagcagttattacaatgggaattcgtctggatgatgaaaaaggatatacaagatttcgctctgtctgtgaattcctcgcagatgctggttatcaggttgatctgattacaacaacctttcagcattgggaaaaagcacagcgtgatctggaaaaaattaaaaatgaaaaatacaaatttggggtcaagttcatttatgagccgggatataagaaaaatattgatctacgtagaatctatagtcatagaattgcagcaaagaacctgatgaatcttcttgagaaagagggagactatgatcttttatatgctgagattccaccgaatgacgtagcactggcggcagcagaatatgcaaagaagaaaggaattccgtttgttgcagatgtgaatgatctttggccggaagcaatgaggatgataatagatattccggtgataagtgatattattttttattccctgcttcgagatgcagagaaagtttacagacttgcaagtggagtgatcggtacatcggatgaataccgtgaccgcccgtttaaaagacggaacagagatattccgagagaaacagtttatgtgggaaatgaactgacggtgttcgatgcgggagcagcacagcggacagctgagattgtaaaagataaagaagaattctgggtatcgtacgcaggaacgatcggaacgagttatgatatccgtacgatggttttggcaggtgaagaacttgcaaaacgcggtatgccacagattaagataaaaattcttggtggtggaccaatgaaagaagaattggaagaacttgcaaattcaaggaagatatcaaatgtagaatttgttggatatgcaccttatgatctgatggcagcatatcttaagaaatcagatattctggtgaactcttttgttaagaaggctccacaaagcattgtcacgaagatcggagattatctggcagcaggaaaaccaatgatcaatacctgtatgagtccggaattccgtgcgaaggtgaaaaacgatggctttggtgtgaatattattccggaagatgtaaatattcttgcggatatgattgagaagctttataaaaatgaagaagcaagagtaaaaatgggtgaaaaggcacgcaaaattgcggaagagcagtttgacagaccaaagtcttaccgaaaaatagaagaattaattcgaggattgattgagaaaaatcagaacaggaactagcaagacagatactaatgagatagacacgaagtgcaaaggggatctaatggacaaattaaaacagaactatgaagaaatattagaacttgtatttaagatcagttatctatgtctggcatttgcgacatttatttctataatttatatatcaccaatacagccaatccttgtgaaattgacattagtgttaggattatttgtgattttggtccgcattataaactggaagaaatatagaaaaatgccatgtctgatattgatgatattcttttgtctgagttttctgcttagtacatttatgaatagacagtatggcatgacagataatctgaaatggattctctggacaggaattcagttttttgcattatacgtatgtgatctggatcgtgacacggagaagtacagaaaagaatttaatattctttcacacttgatgattattgtaacgtctgtatctgctgtaacaagtcttgttatgatggttcaatcttattcggaatatcttacaacaccggagggggaattcattgttaccgggtatacctgggatagattatggggcgtatatacagaccctaattatggagcggtttttagtgtgataggttttatcctggctgttttattcatatttcagcagaaaggaataaagaaacttttttatgtaattgcggcattacttaatttgggatatgtaacctattcagattcaagaaccggtgagatcgcttttgttttgtgtggaggatttcttttatatttttgcctaattcataggaagaatgaaaacaagaagtatagatatgttaaaaatcttttgatcgtattgtgtattatgattgtgtcagttggagaaatgcaggtattaaagacagaaaataccaggtatcagactgaagtggcaaataaaactgcacagaagactacaaaacctcagactacaatttctacgaaaacgaagaaaggaaacaagattcagacagcaagacatgagaatattgaaaaagatgctaccaatggaagaatctcgttatggaaaagtgcagtagaagtctggcagacaagtcctatatacggagctgggtattccacatttatttcatatgcaaaagaacatgtgccggagacatatgctgtaaataatgaagtgggtgattatacgagtatgcacaatgcattttttaatactttggcatttcagggaatccttggatttgttcttttccttttgatcacatttagaattatacaatatgttttagttccggtctttaaggaatcggacagtgatagtttgtatcttatcgcaattcttgctgtggcaggaacagtacttataagtatgttgcttttattagacggaatctatacgaattccccaagtgcttttgctttatgggtgttcagtggttatctggtacaatattcatatcaggttcgtagagaggaaaagggatgaaaaagcttctggtaggatttatcatggatggaaaatcaggaggaattgataaatatcttttgaatttcctgacaaaagtgtcaaatgaagaggtgaggatcgattttctcacgaacgaaattgacgtagagttacagacagaattaaaaaaatgccattcaaatttatatgccattgccaatttgaaacatccggtgtctcaatatcggcaagtgtgtagaattatgaaagaggggcagtatgatgccgtttatctgaatatctcaacagctattgactgtattgcggcaattgccgcaaagcattcgggggtggagagaagaatgattcacagtcattccagtggaaatgactgtgaaagtgctttaaagagaaatctatttaacgggattcataagttctgccgcttgtttttatatcgatacggaacagaattttatggatgttctgtgaaagccggtgaatggttatttccaaaaaaaatagtgagctcatcaaaattttgtgtgattcataatgctgtggatagagaaaaatataagtacagtgtgcagaaaagagaagaaatccgagggagtatggggataactgaccaatttgtaatcggtcatgtgggaaacttctgctatcagaagaatcattattttcttctagatgtatttgaagaagttcataaaaaagattccaacacagttctgcttcttgcaggagacggagtcagatttgaaaaagtcagacaaatagttgctgaaaagaatctggaagatgttgtaaaacttcttggaagacgaagtgatacggactatctgtatcagggaatggacgcatttttactaccttctaattttgaaggacttccaattgcaggaatcgaggcacagtcagcaggtttaccgtgttttatgagtgatgagataacaaaagaatctaaaataacggaagcatgttattttattcctctaaaatcaggcgcaaaatactgggctgaggaaattttagacaacagaatggaaagacaatcagcagaattccttgataatgcagaacagtatgatcttgcaaatcaggatcaggaattgaagagtttgattcgctaaactataattagaaaaagtgaactgatcattttactatatcataataggagcaaaatatggagcttgtaagtgtaattgtacctgtctataatgtggaaaaatatcttgccagatgtattcagagtgtatgtgggcaaagctatcagggattagaaattattcttgtagatgatggttcgaaagataaaagtggtgtgatctgtgatgaatatgcagagcgggatggacgtataaaagtaatccacaaggagaatggcggacttggagatgcgagaaacgcaggtgtggaaaaggcagaaggaaagtatctcttatttgttgacagtgatgatagaatccatgaaaatcttgtgcgtgatacagtagagacagcagaaaaaaatcaggcggatatggttatctttgattatatcggagaagaggaaaatggaaatctgacagatcggtttacatttcctttttcagcaaaccgggtgatagaggttgcagaagaaaaagaattgatcatgagatcctgttcggctgtaaataagctgattcgcagagagctttggaaagaaagtggctttcaatttccaaaggggagatattatgaagacctggcaacgattccaaaagttatgacaaagacgaaaaagatcgtgtacttgccggaagtttattattattatcttatgcgcgacggatcaattatgcacagcagaaattttgaaaagaattatgaagatcgtacatgggcggtagatcaacttcttgaatattttgaaagagaaaatcttatagagacatatagaaatgaactggaatatctcgtatttgaaaatacctatttcgtgccatcaaaagaaatcgtattaaatgacagaaaaagcgaatatcttaagaagttcagagattatgcatacaataaatttccacagatgaataagaattattatgtgcagcagatagcaggaaaagataagatcctcttgaaactattacagtatcgaatgtatggaataatggtattgatgtctcagttgagaagaatgaaggacagactggcagcagtcagcaggaggtaatgtgagtggaactggtaagtgtagttgtaccggtatataaagtcgaacaatatctggaacgttgcgtgaaaagcatctgcgaacagacgtatcaggaactggaaattatacttgtaaatgatggatcgccggatcgttgcggtgaaatgtgtgaagagctggctcaaaaggataatagaattcaagtgctgcataaacagaatggtggattaagtgatgcacgaaatgccggcgtaaaactggctacagggaaatatttgctatttgtagacagtgatgattacatagcgaaagatctggttgaaaaagcagtggcagaagctgaaaaaatggcatgcgatatggttctgtttgattattattgcgtggaaaacgggatagaggaagttcggacaacacagattcctggcggaaaagtgatttctttagagaaggaacacaaattattgcttgcaccaccggcagcctgggcaaaattgttcaacagagaattttacgtgaaagcagattgtccattcccaaaaggattatattttgaagatctggcaacaacaccgatatttttcctgaaagcggaaagaatcagttatttaaaagaaccattatattattatattattcgcgaaaattcaattatgacagggaaaaatcatgagaaaagcagtcatgataaaatggaagtaatagatcatatattgtcggtatatcgtgaaagtggaaaatacgaaacttaccgcgaagaattagaatatctagttttggcaaatgcttattttgaaccatcgaaagaacttgtacttgagggagacgatgggacatatcttcagaagtacagagactatacaaagtcaagaattgggaatgttaagaataataaatacataaatcaatggagtagaaaagataagcttcatttatggatattgaattacaaacagtattggctgatgcgtcttttatctaaagccagaagaatggtatcaacaaaactgtaaaaatcggaaagcaggtagaaaaggtggaaaaaatactgacggtcacagtaccttcctataatgtggaaaaatttttagagaacactctggactcctttgtggatgagagggtgttggatgatattgaagtgcttattgtcgatgatggttcgaaagataagacagcagaaatcggaagaaagtatgaagaaaaatatccagatacgtttcgcgtgatctctaaggagaatggagggcacggttctacgatcaatagagggattggtgaagcaaaaggaaaatactttaaggttgtagacggagatgactgggtagatcaggatggatttgcagaactgattcaaagattgaaaacatgcgatgcagactatgtatttactaattattatgaagtgaatgacgtaacaggcgaattaaatccagttacctttccgggaattagaaaagaagaacagatgccgtttgagatgattgcgaatgagacgagaatctctatgcatgcgcttgttttaaaaacatcaattctaaaagaaaatcagattcgtttagacgaacacagtttctatgtggatgtagagtacattttgtatccaattccgtatgtggagaatgtgatttattttgatatttttgtttatatgtaccgtcttgcacaggtgaatcagagtgtgagcatgctgggatatcagaaacatatgcagaatcatattgacgttatttttcatgtacttgattatattaatgcctacaaagaaaaagcagattatgataaattaaaagaattgtatatggcacgcagaatagcggaaatggtgcatggacaggtagatgtgtttataagctttggttctggagataaagtaatacagaaaaaatttaaagaatttgatgcagaagtaaaagaaaaaaatgcatatgtttacgaaaaatccggagaatttagcggaatgctgcgtctcttgagaaaatccggatttagattttactcgttgatcgtccggttgagtaaggtgcgaaatggttaaagaaaggtcgtaatatgaagattcactctgtcaaatttaactttatcatgaattttattatgtcagcatcttcaattgtatttccactgattacatttccgtacatttcaagagtcttgatggcaaccggaaatggtaaggtggcaacagcgagtgctgttataacatacttcaatatgtttgcatctttggggattccaacctatggaatccgggcatgcgcaaaagtaagagatgataaagaaaaattgtcaaaaacagtgcaggaattattgatcatcaattcaattacgatgtttttaacctgtatcgtcttcgtagttacagtagcgttagtgccggagtttgcagcagaaaaagaattatatattattaacggaatcggaatggttctaaacatgtttgctatcacatggctatataacgcattggagcagtacgcgtatattacggtatgcaacatggttgtaaaactattatcactggtattgatgttccttctggtacataatccggaagattatattgtctatggaggaattactgtatttgcgagctctgcatcttatgtgttcaactttgtgtatgcaacaaaatttgtttcttttaagaaaagtgggacatatgattttcggatacatataaagccgattttgcgtttttttgcaatggcagccgcaaccagtgtttatacgaatctggatgttgtaatgcttcggttcatgcaggggaatacagaagttggatactataatgcagcaattaaagtaaaaacaatacttgttacgctgatcacttctcttggaacagtacttttgccaaggctttcttattatattaagaaagaaaaaacagaagatttttacagaatgatcgggaaagcagtcaattttgtagttgtagcaggacttccattgaccatttattttatgctgtatgcatcagaatcgattcagtttcttgcaggagacgggtatcagggcgcggtacttccgatgattattctgatgccgacagtacttttgatcggtatgtctaatattaccgggattcagattcttacgccacagaatcaggaacagaaggtgttaaattctatcgtgtgtggtgcagttgctgatttccttctgaatctggttctgattccgaagatggcatcatccggtgcagcacttgctactgtgatagctgaattggtggtacttctggttcaatgtgtgtatttgaaagagatattaaaggatatcatgcgcgatgtcagtggagtgaaaattggagcagcgattgtagtggcaaccatcggtgggagtttagtgaagggcttgcttgatttagaatcatctggctggagcatggagatacagtcatttgtaatgcttgcaatcagcgcatgcgtgttctttgggatttatggagttgtactccttatgacaaaagaaaaactggtctgggagattgtagggaactatatcgaaaagaaataggaacaatagagatcaggaaactgattaaatagaaaaaagaaggtgagaagtatggataagacgaaaaaaacaagtttgaaaaactgtatcagtaagatctggaaatcggaaatattgtctgctatcacattgaatcttctttttttagcttcaattttagtattttgtgatgtcaaatatgaagtgtcagatgattttgtgatgtctgcgattttgtcaggagcttatggggggagtttaaatccacatttgatttttatcaatgtcctgtggggatatctgttgaccccattctatcttattttaccagaaatcagttggtatcttatttttcagttattactctgttttcttagttttacaatactttcatatatgttattgaaaaaattgaacagatcaatggcgcttatggtaataactttattattgactgtgtttggcagtgatgcgtatattcttatgcagttcaccaaaacagcaatgatagctgtcatggcaggcagccttgtgtttctatgggcgctgtttgaacaaagatcgttgcggatagagatatcggcggcgattttgtgcgtaattggaacgtggttcaggtttaatattatttatctcgcgggcggtttccttttatttattcttattgtagagattgtccgggtgtggaaaaatgagacggatcacagacgtttttggctaaagatgagaaaaattatcagtgcgggactgctgttaatcttagtagtaacaggctgcaagttatttgatgattattcttataataaggatccagaatacaaatacttcaaagaatatagcgaagcaagggctgcaatcgtagatgcaagtgattacggatatgaagcgtacgcggaagaattacagaaaatcggaatttcagaaaatgattataagatgatgcgtaactggaattttgcagataatgaagtcttctctttagacattatgcagaaggccgcagatattatacaggattataaaaaaaatgtagagatatctaaggaggtaataatagaagagatacagaaccgtggtttacagggatatcctgttttccttgcctgtgtggtgcttacaatattaagtattgtttttcagagaaaaaattgttggacagcaattgtgatatggggaatcggatttgcctatattttatattgctttttgattgaaagaaccgtgtatcgaacggaatatgcagtatttttaggtggatttttaacactcttttacttttgggaaaaattagaatgtgaaaataaaagagaatttattgaatataggagagtctgtgttataataaatacagtatgtctatttttgcaattgccgctttatttaccggatcgatcctatcaggatgtagatagttgggggcgcaaggaatatatagagaatacattttatgagtcatggaactataaagcgagtaaatatcgcaaaatagtcaataaaggggcgaagtcggaagaactgatcaatgagatagaaacacataaggaaaatttgtatttactggattttcagacaatgatgcaagtgttctattatgactggaatccgtggaaagcaattccgacaggagaatttgacaatgttttatatcttgcaggtgtaacaacaaatttcccggattgcaatcagatattacaaacatatgatgccgaacagccattaaaagcattaataaatgagaaggtatatcttgtggattcagagtggaaaactttagaccaaaaagtgcagtatttgcaggaacggtattatcctgaagcaaaggcagaattatacaaagagttagatggctatcaaatatggaagttttcaaaggaatgaggaaaaaaaagaatgattaattttaatgtaccaccaatcgtcggaacagagatcgattatatcagacaagcaattgaaaatcataaaatctgtggtgatggagcatttacaaaacaatgttctaaatggattgaagaaaatacaggaacagccaagacactgttgacgacatcctgtacacatgctacagagatggcagcaatccttctggatattaaaccaggggatgaggtgatcatgccgtcctatacatttgtatcaacagctgatgcgtttgtattaagaggtgccaaggcagtatttgttgatattcatccggaaacaatgaatattgatgagaggctgattgagaatgcgattacggagaagacaaaagcaatcgttccagttcattatgccggtgtagcctgtaagatggatgagatttgtgcaattgcacagaaatatgatctgaaagttgtagaggatgctgcacagggagttatggcttcttataagggaaaagcacttggtacaatcggtgattacggctgctttagctttcatgaaacaaagaattacagcatgggagaaggtggagcacttctgattcgtgatccggaagatattgaacgcgcagaaatcgtaagagaaaaaggaacaaacagaagtaaatttttccgtggtcagattgataaatatacatggatggatgcgggttcatcttatcttccaagtgaattgaatgcagcatatctctgggcacagcttgaaaaagcacaggagatttatgatgatcgaatgaaaacatggaatagatattatgaagctttaaaggaactggaagaagcaggaaagattgaaatgccggttattcctgaggattgcgtacataatgctcatatgttctatatcaaagcgagagatctggaggaacgtcagaaactgattggatacttgaaagagaatggtattatttccgtattccattatattccactgcatacagctccggcaggtatgaaatacggagaattccgtggggaagataaatatacgacgactgaaagcgaaagacttctgcgtttgccgatgtattatggactcgaagcagaaaatgtagattacattgcggagaaagtaaaagcattttatagtggaaagtaaaagaaccggtatagtaaaaacagaggataaaagaatgaagagaaaatgtgtgatctttggtacgacagattttgggaaaatgcttcgatattattttgaaaaatatgcagacgtacagattgtggcatatacggtagataaagcatatcttgaaagtgatacctatgatggtctgccggcagtggcttatgaagaagttgaaaaagcatatccaccaacagaatatacgatggttattgcgcttggttataagaaaatgaatcagattcgacagcagaagtttgaagatgcgaaaagaaaaggatataggatcgaaaattttgttcatccgagtgtagtagacgagagtgttgcaatgggcgaggggaatattattctcgaacatgttacattggcgtatggaacaaagattggaaattccaacattatatggaacggaagccagatttcacatgaatcgcaggttggagattataatttcttttcagtggattctgttatcgcaggaaaaacagttgtaaagaataattgttttctcggaattaacagtacggtacttggaaacaggacactggaatatgcaacattggttggggcaggtgcatttgtcaaagagaatacagagccatatagtgtctatgttccggcacgcagtatctgtctggaaaataaaaaaagtacagagatggcttatacgagataaagagaaaggagtacacaggtcggattttaatactttagaaaatctgatctgtgaaatgattgaatggatatttcatttgtaattccatgctattgttcagaaaagaatctggaaggcgtgatcagcgagattgaagctgcaatgaaaaaaagagaaggatttgaatatgagattattctggtcaatgacaattcaaaagataatacaaagggattgatcaatcggctttcaaaagaaaatggaagaatcatcggaatcaattttgctaagaatttcggacagccaaacgcattgctggcagggtttaaccaggcatccggaaagtatattatgacttcagatgatgatggacagacaccggtaggaatggtctgggatttctatgacaagatgcaggaaggatatgatgtagtctgcgcaaaatatacagagactacacagaaatcggctgttcgaagatttggtacaaaagtgaatgaatttatgctgtatcatatgattgataagcctaaagagataggattatcatctttttttatggcaaaaagatttgtagtgaaagagatggtcaaatatcagaatccatacccttacattgcaggacttctactcagaacatcaggaaagataggaaatgttcatctgaaacagagagaaagagcaacaggaaagagcggctataattttaagaaattattaaaactgtggatcaatggatttacagcattttcaattaaacctttacgagtcggaagtgcacttggatttatcagttctgtatgcggagtgttgctaggaattatctcattaataagaaaactgattatacctacaattcaagtgggatatacatcgcagatggctgttacactgtttttaggaggtctgatcctgggagtgcttggaattatcggagagtatacaggaagaatttatatgtgtatcaataatcagccacagtatgtaatagagagtattgtaaaagacggagaagacctgttgtaaaaaaggttgtagatttaaaggaaggtcggagcgaatgatgaaaagagtaatggtaattgcagggggaacatggcaggttccactgattaagaaagtaaaaagtttgggatatgaagtagtgaattcaaatctttatgaagattctattggatttgagtacgcggattttacgggtgtaatggatgtaagagacaaagagaagaatctggcacttgcaaaggaatataagattgatgcagtgttgacagatcagagtgatattgctgttccaacagtagcttatgttgcagaacagatgggatgtcctggaattggtcatgaaatggcagaactttttacaaacaaatttaaaatgagagagtattgccgggaaaataaatttaagtatccggagtacagattatgtacaaatgtagaagaagcaatcgagttctacagagaattgggaaaaaaggtgattatcaaaccattggattcccagtccagccgtggaatatttacgatagaatccgaacaggaattgagagatcgattcgcagagacggaagcctttacaaatagtggtgattatgtgcttgtggagagatatattgaaggcacagaatttacagtggatggtattgtgattgatggaacacaccatacactggcgatctctcagaaagaacattacgcttataacagaaatatagcctcaaagttgttttttacgaactacaatgagacatttgattatgacctgctcagaaaaacaaatgacgagctgatcagcggaacaggaattaaatatgcgatcacacattccgaatacaagttcgaagatggagattattatctgattgagatggcggcacgtggaggtggaagcagaattgcttctgatattgttccatttatgtcaggggtagacaactatcagctgctgatcaatgcagcacttggcaagactccatctgtggaagatctgcatatatcagatgcggagaaaatgaaagaaagagcagcagttctggaatttctggatatcgaatcagaaggaaagaagattaccaaaattgaaggtgttgagcagattaatgcaattccggaaattttacagcttcagcttgaatttaaagaaggcgatattatagagaaggcacaggatgatcgttccagagtaggattttttattgcacgtgcagaatcaaaagagagaattgaagaaattgaaaaagaagtaaagaatacattgaaagtatctttcgaatcataggagaaaacatggatattaagaacgaaatcataagaaaaatcagaatgaatcgaatttctacaacagaagtggcagactgtctggggaaaacaggcgtatttaaagattctcatgcggtgaacagagggcattttgcggtgggaaatgtaaaatggatctacgcattggatgaatcaaactggagcatacatgaacagatccgtgaagtgcaggccggagatgttgtaatgatcgaagcttttaactgtggtgaccgtgcaattatcggagagcttgtaacaaagtttgcagtactgtatcgagaggcagttgcgattatatccaatgccaatatgagagatgcaaatgatatcattaagcagaattatccgatgtggtgtaaaggatttagtccggtgggctgttttaataaatacattgaacaaccgttagacagtgtaattgaaaaagaacacagagataaatatgaaggaagtattgctgtatgcgatgataccggagtcgtaattattccgaaagaacaacatacggaagagttcttaaagaaattggaaaatattgaaaatcaggaagatatctggtttgagtatcttgataaatataaatgggatacatatgatattgtgtgtttaaaaaaatacttaaatgattaatagagtataaggatgaaagaggatgaataaagaacagttgttaagtaaaaaggagcagttgttaagtaagaaggaacaaattgaaaaaattgcgaagattgtgttgatcgcaggaatttttctctatccatttctttgcagcttctttggcattgacctgggtgatactgggattcatatgtttaactatgaaaatatatatagcaatccggataaagttggttttacctgctatctgacaaatgtacttgcatggggatggcttcagatatttggtggattaggaatctggggattaaatcttctggaagtaattgtggaaatggttatggcattcgctgtctataaggtatttcataaatatttgggtgatttacagacattattcggaattcttattgcaattatggcatcagatacatatttgaatattttcaattatcaccagttcaatgtatttttcctgattcttattcttggatttgaatttaaggctgtagttgagaagaagtttaaatatagttttgtcgcaggaattttcctgacattggttgtattttccagaatgggtagtataacagcattggttacatgctttatctatgttttctcttatttatataacaatgaagatgtaaaatattttatgaagcatctgggagtctttgcgggaggagtagcagcaacgttcggagttctggcagcatttctggcaattacaggtcaggttgaatattttatcaataatatttttcgattatctggtattgcatctacggccggaagcggttatagcatggaaaatctctggtctacctttatatttggaaatcttgatgcaattgcttcaggcgttatttatcttgctgcttctatgattcttcttttaggaatgaatattttgttttcattaaaaggaattcatccgaagaaaataatcctgaatattgcattcagcgcagtagtgattggaattgctgtttatatgttggtttatgcatatgatgtaaatacagtaccaaactggccgcagatgacaacaggtccgtccttttttataggtatattgtatgtagtaactttttgctatgtattttttaacatgtatagtaagaatggaaatccagatctgattattcttggaatctgtgccattatgcttccacttctgacaattgcaggttctaatacaggaacaaaacacgtgattcttgcattttggatcattgctccatttgcagtatccgccgtttgcaggtttgttttcagtaaagccgcacttgaagcagttaatgcaatgacagagaaatatggattgaaaatccgacatggtgcagttttagcctgtacagggattattcttgtctgcatgggagtgaaatttgcagacatgctttattgcacaatgaattttgacagtgtggatagaagttcacttcgatattctgttaacagtgataaattaaaatatatgaagacaacagagagagaagcagatgctgtcaatggtgttctggattgcataaaccatttagatgaggagaaagaacgtccattaatggtatttggcggagctattttaatgtattcattgaatgaaatggaatcttatgtacagccatgggttaccaatccgaattatacggaagagaaactgaaagaagacctgaaacttgcaaaagagaactgggaggagaaaccggttgttatattctgcagaacaaacaattattatgggtttgaggaatataattacgatgctttgattgaaagtgaattatataatcagtacaatggaaaaaaagactggtttatgaaattcctgcacaggaatgattatcgcctggaatatgcaaatgattattatattgtacttgctccgggagatatgacaaaatccgaagattatgattataactggtatattgtaggagaatgaagcagtcaggcagcatgacaacatcggagtagacatggaaaggttgaagaaagtatgaagaataagggagttaaacgtgtacttgcaatggcggttgctacagttctggttttggaaacattaccttctgttactgtatttgcagaagaaacagaaagtacatcagtacaagaagatttaacagagccacagcaggcacaacgggaagacagaagcaacagctggagatacaaagatggaacaccaattttgtctgatacagcagaatatctgcgaagttcttcggatgcgtggtatgaagaagacgggaaattctataatgaccagggagaagaaatcacaggagctgttgccaaaggaattgatgtaagtaagtggaatggagacattgactgggcaaaagtaaaggcaacagatgtagattatgcaattatacgttgtggatatggagatgatgagacaagtcaggatgatccatattggaagacaaatgcagatgcatgtacaaaagaaggaattccttttggtacttatatttattcttatgcagacagtgtgacggcagcaaaaagcgaagccaatcatgtacttcgtctgatcaaagggtatgatctttcttatccgatttactatgatctggaagaaaatagtgtgagggaagaactgagcacaaaagagatcgcagaagttgcacagacattctgcagtatcatagaagatgcaggatatgatgtggcagtatatgcgaataaagactggtttacaaattatctgacagattcttattttgatacagttgaccattgggttgcacagtacaattctacctgtacttaccaaggagagtattcaatgtggcaatgtacagattctggtacggttgatggaattgatggaaaagtagatctgaacatggatttcggtgcagaaactacaaataaaaaaccggaagcagttcagaatttaaaagcttcttccaagataggtgcggtgaatctgtcctggtcagaagtaaagagggcagatggatatttagtttatggaatccgtggtagcgggaagtatggttatattgggatgacgagcaagacttctttctcggatacaaaagcattgacgagtgattataatttttattgggtatttgcttatcgtaaagattcagaaggaaatatgctcgccggaagtgcaccggaaaaatatgtttatggaaaagctcaaaaatgtgaagcagtaacagacctgaaagcatattctgtcagtggaggggtaaagttgacctggacaaaatcagaaggtgcggaaggttatcttgtctatggaattcgaggagaaggaagttacggatatattggcatgacaacaacaggaacaacatttacagataaaaatgcattaagagatgagtataatttttactgggtattcccatatcatacagacggtaatggaaataaagtagcgggcggtacagcacactatgtatatggaagagcaggattatgataaaaaagattctatttggcagtaaggacaaaatgaagtcggcgtacttatggaatacatgtgcagcaatgctgaatgcattccagacagtatttatactgatgcttatatcccgcattgatccggtgatcgatgcgggcgtatttacgattgcatttgcgataggaaatcttatgatggcgataggaaaatatggaatacgccagtttcaagtgtcagatgtcgaagaaaaatatagttttaaagaatatacagttgcgagaatcataacgagtataattatgattgctgcatcttttgtttatgtcggagtgaatcttgcatcaggattgtataattcttcaaaatctataattataattctaatctgcctggcaaaagtgatcgatgcggtagaagatgtgattcatggaatgttccagcaatatcttcgcctggatgtggccggaaagatcctgtctatcagaatgtgtacttatatttttgtatacttagtatgttattatttcagcaaaaaccttatcctgacatctgcagtggctttgcttgtatcatttattcagttcgtgatattgaattatacggcaataagaggatttgaaataaaaaagaaaacatttgaaattaaaaatgttaaaaatatatttgtagaatgttttccgctttttatagcatcttatttggtgatttacattggaaatgcaccgaaatatgcgattgataaggtgatgtcaagtgaagcgcaggcatgtttcacctacattttcatgccggtctttgtgataagtcttttgagtcagtttgtctatcagccggtaatcagcaaaatggctcttttatggcatgagaaaaagaacagtcagtttaataagctgatcttacgacagattgctttgatcctgttgctttctgtagctgcgatcatagggggatatttacttggaattcctgtcttgtcattaatttacggtgtggatctgacagattataagaaagcacttgtgattttgctaattggaggaggcgcacttgcaattgttaattttcttcagatgatcattactgtcgcaagaaaacaaaaactgctgaatataggatatctgttagcttttttattgtttgtttttggtggaaaaacaatcacagaaaagcatggaatgattggaatatcagttttttacacagcagtagtcatgatcctcggagcggtatttatcgtgttgacgatagggattatcaaaggatatgcaaacagtgatggaaaaacagttgcagagaaaaaacaataaatctccaattaattattttaaattaaaaaacggtatgttaaaataaaattagaaaaagatcagataaaatagtaaaaatacgagggaaacagggaatgaaaacatatttagtaaccggtggagccggatttatcggaagcaattatattcattatatgtttaaaaagtataaggatattaaaattgttaatctggataaacttacttatgcaggaaatccggaaaatctgaaagaatttgaaaacaatgaaaactatgtctttattaaagaagacatctgtaatgcagaagctgtaaataagattttccaggagtacgatattgacagagttgtacattttgcggcagagagccacgtagacagaagtatcaagaatccggagatttttgtgcagacgaatgtgattggaacgacagttcttttgaatgccgcaagaaatgcatgggaacaggaagacggaacctataaagaagggaaaaagttcctccatgtatcaacagatgaggtgtatggatctttggaagaggatggaacattcttttatgagacaacaccgtattcaccacacagcccatattcagcaagtaaagcatcttcagacatgttggtaaaggcttatattgatacttataagttcccggccaatattacaaattgcagtaacaactatggaccatatcagtttccggagaaactgattccactgatcatcaataatgctttgaacggaaagaaaattccggtttatggagatggactcaatatcagagactggttgtatgtagaagatcatgctaagggaatcgatatggtacaggaaaagggcagactaggtgagacttataacattggcggacacaatgagcgcagaaatatcgagattgtgaagacaatcttgaaactgctctatgatgtacttccggaaactgacccacgcagagaacatattaatgaaaatctgatcgagtatgtcgaagacagaaaagggcatgacagaagatatgcgatcgcaccggacaaaatccgcaaagaagttggctgggagccggagacagactttgagacgggaatccgtaaaacgataaaatggtatctcaagaatctggactggatggagaacattacaagcggagaatatcagaactattataaagagatgtatcatctgtaaatagtaaatgaatggagcagatcatatgaagaagagaaaaggaattattcttgccggaggatcaggaacaagattgtatccgattacacaggcagtttcaaaacagattttgccggtttatgataagccaatgatttattacccactttccgtgcttatgcttgcgggaatcagagatgttttgatcattactacagaaagagatgtcagtgtgttcaaagaactgcttggtgatggatcacagcttgggatgagatttgaatataaagttcagaaaaaaccaagaggacttgcagaggcatttatcattggagaggattttatcggtgatgatgacgtggcattggttctgggagataacattttctatggacaaagcttctcccctgttttgcagagggtgaatgaacgcgatggagccacaatctttggatattatgtaaagaatccaaaagcctatggggtagtagaatttgacgaatacaataatgtactttctatagaagaaaaaccgaaagtaccaaagtctaactatgccgtaccaggattatatttctatgataattctgttgtacagtatgcaaaggaagtcgagccttccgaacgtggagaacttgagattacaagtatcaacaacagatatcttcaagagggaaaactgaaagtggaacttctggggcgtggctttgcatggctggatacgggaactccggatggacttatggatgcagctaatttcgtggcgacattccagaaccgccagggattgcaggtgtcctgtatagaggagattgcatataaaaaaggatttattgataaagaacaattgaagaagttaggaagccgtttacgtaagacaccatatggacagtacatattatctttgtgtaaagaacctggtgagatgcgcaaacagaaataaagaaaagcaggtattatgacataaagaagtgaaagcggaatgaaaatgtggcataatatctgcttttggtattttgaagggagtaatcttacagattgtaaaatttgtaaaattatggaaggctaattgacgctccggattttaggtggtatactactcttaatacggacttactatttatttttattgaagcatttacttataattattacaggcacatttgagtcaaggaaggagggtaggtccaaagaagaaaaaggggtgatgacgagcgagaaatagataggacgctcagaggagagtatatggaaattgtttaagaaaggaaataaaggagaactatgaaaaagaaaaaaacacaacttttaggtattgttctttcagctgctatgcttgcaacatctgttccggctcctgcttatgcagaaccgacagataatgtagcagaagaggaagatagcgatgccgcagctgttcaggaaacaacagatgaagctgatgctgtagcggatgatgcaactgatgattccacagcagctgacgatgcgactcctgaagaggcggacgagcaggatacagcggatgaagctgctgatgcagatgctcaggcggctgaagaaggagataatgaagttaaggtggatggtggttatacaatttctatcccgacaattaacttccagggtgctaatgcagctgtagctgaacagctgacaaaggacgtggaaattgatgaatctgatcctgctatccagagtctgagaaaagcactggaagaggttgagattgttggcggcgaagccggcacagaatccaatgaatctaacatcagcacagcagacctgtatgaagcagatgaacaggctgaaaccaagaagctgacagaagaccagattaatacagttgttggtatgtatcagcagtatctggatcagtggtcagccaatgccaatgtactcggtgttcagaatccattctttctggatttcaacgatgatacagatggtcttggtatccttggtgagatgcttgctttagacggcaaatctgttcaggatgtcagagatggcaaggttagctatgatgacctgacaggtatgatctttactttcacatatggtgataagttaggtgttaagtattatggtccagatgtaacaaatgcaagagatgaagcccttgctgcagttacagcatcaggtgcgcagacaaaggcacagaagctgcttgttctgaatgactggctggcacataacaatacatttgatatgtcctacatcatgaactccggtaaggaatcagatgatgacaagccgatgattgcaaaggatcctcagaagcaggagcatgaagatgatgtttataatgcgatctatgaagtttatgaacctcagattaaacagaatttccatgatcagatttttgcaggcatcgaaaatgatttgcgtacacagttctatgaaaaggctattcagcaggcggtttatgagcaggctttaggcaaagctgaaagtgaagccacagatgaagagaaagcagccgcgaaagagcaggctgaaggctatatcaagcagaacaaagaagccattgacaaagatccggatggctatgtaagaaccaattttggtgaggatgcagctaaccagatgaagactaaggcagatgcctttatcaaagatgctgaagaaaatggcgttgaggttgatcctgagaatgcgcctggttacaagatgacagttgagcagattactcagcagcagttagaaagcgatgatccggcattggatatggacggtgatggaacgaaggaaacaagctttaagcaggcgattccaatctatgcgaagcaggctgcaaccggtatgacaactggtgttatcaattattgggaaggttctcagtttggtgcattcggtatgggtacatccgtatgtcttggttactccaaagcttacacataccttgtacagtgtctggataaggatatttatctgaaagatacgaatgtaggctatgacagctccaactggaagacagccaaagaactgtactatacagatggcaagcttgacacttcaaagaattacacagttgaccttgtaagaatctccttccagtctgatgttacaatgtacggcgaagaacaggaggacttcggatccgaccattattggaatgcagtaaaggttgatggacagtggttttatgtggatccttgttacacagatgtctacacagaagttatgagccgtgaccgtgttgagacagacggtgatatgaaccatacatacttcctgttcagtgatacaagtgccagaaaattatatgatggtaatttcagttctttgagatctctctatgaaaacgaagcaactgataagacctatgagacagcatggatggcgcgtgcggcaagcaatgtttactatgcagacggttatgcgtactacatgtatgattctacagacctgtttgacagagtaaacagttcaagcatgaatcagagccagaaggctgcagagtacaagattgttcgtcataaactgacagaaaaggatgcaggtgatggcgacagtgactatgagacactgattaacttcacagacaaggaaaacgacgatgatgacgatacatttgtaagcgttctcaaagacggcaagatggtgaagaacgaccttctgacaaaactgtatgcacagttcgtagatgaacagagcatctacccatctatcggtctgacagcagcgctgtacacagatggtaagatttacttcaacgtatccaacgatatcgtatcctacaatcctgcagacggtgcagtagccgttgtgaaggaatacaatacagtatctgcaaaacgtgataatacaaagctgtttggcggtatggcgtttacaacaacaagcaaagacagtgcagactttactgttacaaatcatccaatcgcaggtctgactgtgaagggtgacaaactgattgtttcaatcggtacaaacttcgcgttcatttcaggtaagactggcttgcttgatcatacaagttccggttgttatggttatcaattcgaagagacagattacaatccgacttatacaaactacaagaagtatcagcagttcatgggcagtcagagcaatgataatgacgagttcatgtggtcagctaacttcgttgatacagttgatatgaagacactgacaggtacttctcataattatgaaacagtttccgtacctgcaacctgtggccgtgatgcatttacagaggaacgttgttctgattgtggtttgattaaagatggtacacgtgtagaaaaagaaaatacagcacatgaacatcattacatcaaattccatgaagtatactatacaaagacagatggtgttaaaaacgaagcagataactatgtatgcccggaatgtggtgcttgtattacagaacctgttaaatctaaatacgagcaggcgaattccacatatgagaagagaaaagctatctgggatgcagcaattaaaaatgaagcagagggtcatacatatgtaccgacagatgcaaaatggagtgatgattactcaacagtaacattccagaatcttacatgtgaatcttgtgcagataaaattgacaagctcgattgcttgctttcatctgacgataatgcaactaataaagcgaaccgtgattctatcaataagacactggataaagctgtaacagtagatgctaagatggtcagccatgctggaacatgtgatgaaggtgtaacagctgtatacaaagcagcagataaaactgaagacggtgtaaaatatttagtatctacagaagtaaaaggcgaagcaggacagcatacatatagtgatgtaaaattcaactgggatgcagctgcaattaaagatgatgatggaaacatcacaggttataagacagatcagaaagaaggcacttcagtaacagttgatgaagtgaagtgttccgtatgtggagaagttcagaaaaatgtatccgtatctgtagtaaaagatacagatgcatataaagcacctacatgtgaagaagcaggaaaagatgtttatgtagcaacagtaacatcaacagatgataatactgtacttgcaaaagagacaaaagaagtagcaattgcaaaacttggtcacaaatacggcgatccggtatggtcagactgggaagaaaaagatggtaagtggacaacaacagcaacatttacatgtgcaaatgatgcaacacatgttcagacaccagaagttaagattgatagtgaaacagtcgaaaaagcaacttatacaaaagaaggaaaagttgtttatacagcatctgtaacatcaccagatggaaagaaagttgttaatccgacaactaaggaagtcgtagttgaaaaagaaagacttgcagcagtagaaaacctgaaagcatcttcttcagtaggtaaggtaaaacttacatggagtgaagtgaaggacgcagaaggatacctgatttatggaatccgcggaggcggtaacaagtatggttatatcggtatgacatctaagacatcttttgttgatgtaaaagcacttacaagtgattacaactattactgggtatttgcatactgcaaagacgaaaatggcaagatgtatccaggactgacagcacactatgtatatggtaaagcacagaaatgcgcagctgttacagacctgaaagcttcatctgtaaagggtggagtaaaacttacatggacgaagtcagccggagcagaagggtatcttgtatacggaatccatccaggcgagaaatatggttacatcggtatgacaacaaaaggcacaacatttacagataagaaggcatccagcacagattggaacttctactgggtattcccataccatacggactctaacggaaacaaggttgttggtggaacaccgaagtatgtatatggaaaagcaaaataattgaatgagatctgactcataagttataaacaggatttaacttgtgaagattatacgcaaaaagcacagtgatttattcactgtgctttttgcgtaatatgctcctctttgattgtgtaagacactgggggatgatataattaattcagttaatattcgttatattccaaatgtaagggagggaaagtgtatgaagaagaaacgaggcgggcagaaaaaaagaaggggaatgtgcctgttactgattttatctatgatagttctggctctttcaggttgctctaagaaaaaagagacaaaaacagaaaaaccaccgactaagaaaatagaagtggaaaagccagaaccagtagaagaagtgccggaagaaccggaagaagaaaagattccggaaaatcaaaacctgctgacaggtcttgcggatctgacagatgctgctatcggtaaacgtccggtggcggttatggtgaataatattccggcagcaatgccacagtacggagtagaaaaagcagatattatctttgaaatcccggtagagggtgatcagacgcgttttatggctctttatgcggattatacaactgttccgcagatctgtgcgatacgaagttgcagatattatttcccggcactgtctcagggatttgatgcgttttatgtaaattggggaattgatgatagtatcgcagattatctggaagctttgaacctggatcagtatgatggaatttacaatgcaggaggtctgtttggacgagatatggaacgtcggaatcaggggtatgcattggaacacacaggatactttgatggaacaaagtttgcagaagtagtgcaaaatactggaaagagaacagaccttgcggatgataagaaaggaacagcatttcagtttaatggattaaatgaacaagtgaaaccatcagaagatgtgtgtaagaaagtgagtattgattttggcgcacagtctgctacacttgtctatgatgaagcaagcaatacttataaaaaagaaattgatggaaatgcccagatagacggaaagacaggaaaccagcttgcttttaccaatgtgtttgtgttagagaccactatctctgtcaaagatgatttgggacataaagcagttgactgggatggctgggaagactccatgggatattacatttcgaacggtgcaaaacagaagattcattggagtaaagaggaaaataatgaattatcaagattaacattttatgatgaatcaggaaatgaaatatcaattaaccgcggaaagagttatattgcatttaactatccgaatcagacaacatatgaataaataaataatcccctgccagttgcagattaatttgaaatagcaacaggtaggggattgtttattgatactcatttttagttgacttcaagcatgatttctattgcatgaattgcatgctgaatcatggctactacagtattatggctgtttttatcaatattagaatcccagacatcatcgaaaaactcttcgaagatatgatccaatataatcttatttggaatgcagatgttatattccggagtcaacttctttaaacgcagataacacaaagaatctgatacaaaaagtgtcgggtgtgctatgtgctgatggtcggaaagaattccttccggaagaacgcatacatgcataagatcaagtttgtttaccagctgttccagattcttaaggcaacgcagtctttgggatatagttaatgatattcttacaccgaagaaatcaagttctcctgtaactgtgaaatcttttaacacggaagcataaatgatcagatggattggtgtggtctccaaaatgcgctgtgtcaggtgatttagtttttttacgtcctccttctgaagatcgttgttattcaggcaatactcatccaggagctccgtatatagatcttccggaagaaaatgttctgtcaggtgtccgatgagacagtattgcttctgtgaaattaacgtttgttcatattcaaagcgatgaatcatttccggaatggttgttttccggattaatagtgtttctttattacaaagaagtctgatcttgtgataaagttcattcgttagatcactgtcttcaattgtggtaattccaagacagtgactgctatctactaacattccagagatagcataagtgtctctgattgcaaaaatgagcttacgttgagcctgcgaaccagaataaagattaaaatcaatattagagagattggtcatcacattcattaagaaaccagcggtataggcaggagtggaagcagccgattccaggtccataagaagtgaaaaatgtacaccaggtagaataagattccggccgccgtgtgcactgttgagttctgcaatcaaaagctggtaattaggatcgacattcaaaatatcaacaatcgcgtatacgtttagagaattaacttttcgaagtgaagggtgtttcattttaaaaatgaactggtctaatgtaagctccggataataagaaatttttggagctacttctgtaccggttgagttttgtaattcttttacatacatatattcagattcgagattgtcataaatagcagtttcaagatcattgatgtcctgtaactgatattcctgtaacagttgtgcagtgctttcttctgaaagtgcttcaacaatgcagtgactgatagcctgaagtgtattttcatgatttttttcagttggcaatagttttccgctaatccatttactgatataggagtcatcatactgaacagcttttgcaagaatactattctttagctcagcaatagccataaggtgttctagcaaaatgctgaaacggtttttatctttcatatttttgttatattacagagcatagaataacttgtaatatgtcccccttcctttaaaaataccttaaagaagttgatagtatgatattagtttagagcagagaaaataaaattgcaataaaagaaccataatttacctacgattttgtatttatttcaaaaatgaagcttggaaaacaagatgattcatgtgaatcatgttgattcaagtttccataaattgtcatttgaaagaacctgtgataaaatttgaaagtatttttggggaaaaatgacaagaaaaacaaaagaaaagaaggggacaaaattatgaattttacagagcagaaattgacaggtaaagcaagtattgacaaaccttggctgaacttttatccggaacagttcagaaatcttgagataccaagaattacaatcgaagctttcctgaaaatgaaaaacccgaatgaggataagatcgcatttgagtattatggaaataagattacatggaaacagttatgggaagatgtagatgttgcggcaagagcactgaaagcccttggatttaacgaaggtgacagagttccgtcctttttagtatctacgccagctcattttattctgcttcttgcagcagaaagagtcggtgtagcaattatctgtcgtgatgacgaaccggaagaactttgttttgcaatccgtaaatgtaaaacagatacagcatttgtaatggattatctttcaaaagaagatgaagagttattccgtacaacaactccgatgacacgtatgattaaagtgtcaccatttgaatatgcagacaagagccagatgaaggattatgtattagaagaaatcacagcccgctatccggcagagacagagacaacagaaggcgatatgagctggcaggagtttatggaactgggaagaaacttcaaaggtgaatatcttgcaccggtagatcctgacagagctgtgtttggagcatacacaagtggttcaacaggaatctctaaacttgtaatccattcttcagcgaatatagtagcaactgcataccagatgtcaatctttattccgccgtcagatgtgcaggaagtctggtggacaccaattcttccaccggcattgatcgcagtaacagtttcaatgacgatcttcccactttctacaggattaatggtatcacttgatccattctgtccgttagagaatattgacattgaattcatggatcgtaaaccgaacttctgggcattgatcccactctattgcgagatgttaatgtccagtgagagaattccggaagattacgatatgtctcacctgagaacaatcggtgcaggtgccgaagctatgaatgaccgtaagtatgcagaggtagaagaattcttccataaacacaacgttcaggcaaaattaagtgcaggttatggacagagcgagggatgctcaaacctcacactgccgaacccaatgttcccattggaggatggatgtgtaggtatgccaatgacagcaactgtacttggtgtatttgacaaagatctgaatgaattaaattacggagaatcaggagaactctgtatgacaggtccgtctatgatgcttcattactcaggctggagaggtgaagaactgacagagcagacacttgttgagcatccggatggaaacacatggttacatacaggagacgaggcttatatcacagagcagggaattgtgcatattcttggtcgtggtgaaatcaaagcgtatggagacaagccacttcatgtaatgagaatggagacaaaaacagtaagaactcctggagtgaaagatggattcttctgtctcgttccggatcaggagcatgaaggatattatcgtccatatctgtttgtgattcttgatggaacaaagacacttgaggaagtagcagaactgctgaaagatacactggaagaacatgaatatccggtagagatcagagaaattactgaaagaccttacttccacttcaaaacagatagaaaaggtcttacagctcagattcttaaagaattagagcaggcaaaagaagaaaaataaggaaatcaaaggttttgattgttccagggagcaataaccgttgagtagggaatgtgaaaaaagtgctgagttataggaaaaatccatatgactcggcactttttaagtgcgaaatagagatgattttgtaaaagaatgaaaaagttttgctttgctgttgagaactgaaagaaaaaatgcgattttatgtaaaaaacacttgacacggaacacaaatcaacatataatagcaaggtatgacataaggagaaacagtatgcaccaaagccccggagtatgctgatttcaaataaataagcaatagtatataatgattatttataggaggaacacccatgaaaacttatatggctaaccctgataagattgaaagaaaatggtatgtggttgacgctgaaggcgctacacttggacgtcttgcatctgagatcgcaaaggtactcagaggaaagaacaaaccggaatatactccgcacatcgatacaggagattatgtaatcgttgttaatgcagagaaagttaaagtaacaggaaagaaattacagcagaagatctactacaatcactctgactatgttggaggaatgaaagagactacacttgctgagcttcttgctaagaagccagagaaggtgatcgagcttgctgttaagggaatgcttccgaaaggacctatgggaagagacatgatcaagaagcttcatgtatacgctggaccagagcatgcaaatcaggctcagaagccggaagttcttacattttaggtagaaggaggaaataacagtggctaacgcaaaatattacggaacaggaagaagaaaaaaatctatcgcaagagtatatcttgtacctggaacaggaaagatcacaatcaataaaagagatatcgacgagtatcttggacttgaaactctgaaggttgttgttcgccagccgctcgtggctacagagacagctgacaagttcgacgtaatcgttaatgtatgtggtggtggatacacaggacaggctggagctatccgtcacggaatcgctagagcactccttgaggcagacgcagattacagaccggttctcaagtcagcaggttacctgactcgtgacccacgtatgaaagagcgtaagaaaccaggtctcaaagcagctcgtagagcaccacagttctcaaagagataattatctcgcaagagaattacaattcaaagagattacaaacctcagaacttcggttctggggtttttctttacccttaaatcttgatgaaatgtctagaaatgtggtgaaacttattcggtttgcaatacgtttgcaacaaaaatatctaaaaatataggtaagcgttaaatataggacacttttcggtgatagacactgtagagcgtaaacttctttatgttctttgttctagggcaaaaaagaacttgtatttatttagtgaatatggacgaactacaaagaatggtttggagtattcctcaacagatgaactatcattaattgcggatatgatgtgaaatcgaaaataaatgataaaactgaaaagatacctacggggctgtcgctttgatatgctccctcctactcgattattgtgacgggccaaagtccgagtttgctcgggatggatgaaatgctgcaagaatggaaaggcgcagaccagtttattattgtcaagagtacctggtttgaaaaattgatggcggaataataagatgctgtgatagaatgaagaaaatgattggatgtgcaaactggaagtgttgtttgatgttaagcacgctacagtaagcgaacatatttcaaatattcttgcttcaggagaactggatgagacttctgtcggtttttccgacagaagtacagggggacgaaaaccccaaatttataatttggatatgattttgtctgtcggatatcgagttaattctaaaagaggtataactttcagaaaatgggcaaataatgtccttaaacagtttattttgcaaggctatgcaatcaatgaaaagcgtcttcaggcgcttaagaaaacagttgatattcagtcaaggatgcttgcagatgcacttgatatagaggagaaagatgtgctcagagctgtgaatgaatacacagatgcattgattcttctggatcaatatgaccaccagacattaagggagggatttgcatgaaaagaaattactgggcgttattagtttttgcgttaataatagtattgcagtggatcggattaggatttcacggtcaaataagatttatttttttgataattatattagttctaattgttttattggcaatattattacggaaatagtaaaagtgaatagcgaggtgattgtatgaaaaagttaattgcatcagttttgacattagtttgtattcttactttggcaaggtgtggaaaatcagatagtggtgactaccctgcaactataatggtaaatggtactaactactattccactgatcatgctgttcctgttgaagtggacgagagtgttattcaatatactacttcttatgcagaaaacggcatacctcaaaaagatggcgaagccaatttcaacagagatttaggaacaccttatgcagttattgaggatgacagtgtagttgtccttatagataacgagtggatagagttcaaagcgaagtaagataacttcaagtctgatgaagagcgcgaagcgtgaaagaaaatacagaaagaggctagatactatcataaatacctggccgtgaagaaaggtgcttagttgaatcagctctcataatgcaccttacgttccaatatctcatgcgaaacgaaatgctggaaagaatcagcaaaaatgcttgcggcgttggttcatttcatgcaagggacaccatatatctatcagggcgaagaacttggtatgaccaatgcacatttcacaacaattgaggagtatcgtgatgtagaaagtttcaactattatcagattcttctggaaaacggaaaaagtgaagaagaagcactgcatattttgtcagaacgctcaagagataactcacgtactccgatgcaatggtcagcagagaaaaatgccggattttcacaggcagaacctaaagttgtatggcagagtgagtgggattcatatgaattgttgcttgaaaattactctgacggaaaagtagatggaacgttgagaccatacgagtgcaagatgatgcgttccatctagagagtataaattatgtagagaaagaatcgattgaggttaggataagaaattcaacttcaactgaaattaaactgtatgaagcgattcctgcgtattcttccccttgcaaagaataaataacatgattaagagaacaagtggaaagataagaccaattcccattccaacacggatattattatcagaattctgggtaacataacctacaataccaggtccaatgctgcctcccaaatcgccggccatggcgagcaatgcaaacattgcggttccaccggccggcatttttttagatgtaatactgattgttccaggccacatgattccaaccgaaaaaccacatacaatacaaccggttaacccgattaccggattcgatgataaggtggttaaaagataacagatcacacagaggattccggaacctgtcataaacttcatcaaatccattttttcaccatattttccaaaaatcaggcgacttattcccattgtaattgcaaacatgcaaggtccaatcaaatccccaaaagttttagaaagtcccagtgcagcttcggcataggctgatgcccattgtgccatagccaattcagatgctcctgaacaaatcatcaggcagattgccagccagacaacaggagttcggaataactgtctgacgcccatcccatttccgtcacttactaaatgttctatcggacaagttgcgaaattatatatattaattgccggaataagtgcccacatgactgccagccatttccaactattcatcccgaacaggaagaaaaataagctcgaaatcagtatggtggctgccgcaccccaacagtaaaaggagtgaagcaggctcatagttgcttctttatttttaaacgggcatgcttcgatgataggactgcagagaacttcgatcaatccactccccacagcatagataattacacttataataattccggtaaaaggattcggtaacagatcaggaagaaatgcaagtccaactaatccggcagcagcgcatatttcagaagttacgatacatacacgataaccgattcgatctacaaacttcgcacaaaataagtcgactaaaagctgtgtgaagaaaaagaatgtagatattaaagcaatgttacccaatgaaatatcataatcattgtgaaattttaaaaataatagtggtgcgaaatttgcggatatcgcctgagtgacgaatcccagataacatgccacttttgttttttgataatctggcataacagaaaactcctttgttctttttataccgtattatatattagataacaagaaaaaacattgacttatattacataaatattgtattatatcgtaaatccaataaaaaggttgttgtgaggaaagatatggcacaaaataaaattgtaacagatgagaatttaatggaatcagcaaaacatgggacggacagttatccgtttaaatgctattttgaaaagttatcacaatttgattttcattgcattgactggcattggcatacagaatgggaatttgtatatgtcgaatccggaaacatgacggtatgtgttggtgaatcgatgttttcactatcagaggggaatggtatttttataaattcaaagattttgcacaaattttattccagtgatgaaactgtcatccccaatttcctttgtatgccgtcctttcttgcgccggaaaatagtttgatctatcaaaaatatattcaaccgattgtttcatcatcgttgtcatacttgatcttaaacggggagaagttatggcaaggagagacattagaaattatgaagcaaatattttctgcacaggatagagaagttgatggtgagctgcttacatcagttcttatgcagaaattatggctgatcatttatgaaaatattgacaaaacgtgtatggaagagcaagtggacgattccggttcagttcaggcacgcttgcagcttatgatgcagtttttgcaccagaattatgcagaagatatttctttggaggaaattgcctgttatgctaatattagtaaaagtacggtgttgaatctttttaatagatttttacatatcactccgattaattatttgatcggttaccggctgaagaaggcagcattgttgattaaaaatacagagaaaaaaatcaatacgatttcttacgagacagggttccataatgtagattatttttgtagagtatttaaaaagagttataaaatgactccaacagaatatagaaaaagtaaaaattcaacagtacaataaagttagaccagaagaggaaaatgacattatgataattagaaaatatacagaaaaagatatttccgagatggttcgcatctggaatgaagtagtagaagatggtgaagcatttccacaggaagagttcctggatgataagacaggggcagaattctttgcatcacagacttattgtggtgttgcagataatgatggggaaattgtaggactttacattttgcatccgaataacatcggccgctgtgggcaccttgcaaatgcaagttatgcagtggattcaacttgccgtggaaagcatatcggtgagaaacttgtaagtgactgccttgtacaggcaaagttgcatgactttaagattttacagttcaatgcagtggtagaaaataatgttcacgcacgtcacttgtacgagagattaggatttgtgcagattggaactgtaccgaatggattccgtatgaaagatgggacatatcagaatatttgtttgtattataaggaagtgtaataataaacaaatattgacaatataaagatacgaggaaaatgaaatgaacatacagatttttggaactaagaaatgcaataacaccaagaaagcagagcggtttttcaaagaacgtggaatcaaatttcagttcattgatatgaaagaaaaaggtatgagtaagggtgaattcaattcagttgcgcaggtgaatggtggattagaaaatatgatcaactgggaaggaaaagacaaagatcttcttgctctcattaagtatattgcagatgaagataagctggaaaaggtgcttgaaaatccgcaggtgattaaaacgccggttgtcagaaatggaaagcaatccacacttggttatcagccggatgtctggaaagcgtggaaataagaaaggtaaaggataaattattatgatttatacagtaaagagaatcgatgaagatttagattttggttgcgaagaacgagccaaagacgctccggttatggcagtggttacacttgtagattcatccggagaagaattgagggtgaaagcagaggatgccctgctttataaaaacaatatcaatgaaggagacaaggtttgttacgataaaaatgatccggattccgttattagccatatatagatggaaagtgtggaaatgacgatgtaactatttgttgatgcagacacctgtccagtggttagcatagttaaaaaatgcaaaaaagcagttgcagatctggggcgtattcttttagtgcataagcatcaaaatagtgttataatcacaaaagcgcctgggaaaatggacgcagaaaattatatttatcacaaggaggcaatcacgatggatttctacaagagagcacttgaattaaaagacgaaacagtagcagacagaagatacattcatcagaatgcagagacaggacttgagcttccgaagacgaaagcttatgtgatggataagttgaaagagtatggtctggatccggttgaatgcggagagggagttacggcaacgattggaaatggcggtagggttcttctcctgcgtgcagatatggatggacttccgatgccggaggaaagtggtgaagcatttgcctgtccaacaggaaaaacagcacatacttgtggtcatgattttcatgcagcaatgcttttgagtgcggcaagaatcttaaaagaacaggaaagcaagttgaaaggaactgtgaaattcatgttccagccggcggaagagacatttcagggaagtaagaatatgattgagcatgggattcttgagaatccgaaggtagatgcagcacttgcgtatcatgtatctccgggaaagatgccggtcggactttttatgtataatgataaaggcacaatgatgtattctgttgatggatttaaaatcacggtcaaagggaaaggttctcacggagcctatcctcatgcgggtgtggatccgattaatatcggagtacacattcatcttgcattgcaggagttgattgcaagagagactgatccggcgcacgcatgcgttctgacaattggacagtttaaggccggcgaggcggcaaatattatcccagagacagcagttcttcagggaacgatccgtacaaacaatacaaaagagcgcgaacttcttgttcgccgaatgaaagaagtggcagagaagaccgcagatgcatataatggaagtgtggaaatcgagatgatctccgaagttccgccgctgatctgcaatccggcattgacggacgaaatgattggatatatgaaagagatggatattccgggccttactccagttccagatgtgagtgcaagtgcatcggaagattttgcagtgatcgcagagaaagttccgagtacatttatgtatctctcagcaggttatacggatgagcggggaacttatccggcacacaatccgaaggtacagtttaatgaagatgtctgcccgatcggtgtggcatgtctggcacagtgtgcggtgaaatggctggagagtcatcaggaataagaagtaagaattgaaaacaagagtaattgttcagagccaacctccaaaatgctacgcatttcgtcggtgtggcgtatccgccaaataaaatttcaaaaacagttttaaaaatgcaagcattttatacctgttttttgaaattttgcttggctctgaacagttacaaaataagaatacgattggagagcgatatgagcatattaaatgtagaacacctgacacatggatttggagaccgtgcaatcttcaatgatgtgtcattccgacttttgaaaggagagcacattggtcttgtcggggccaacggagaaggaaaatccacctttatgagtattgttacagggaaaatgttaccggatgaagggaaggttgagtggtcaaagaatgtgcatgcaggttatctggatcagcatgcagttcttgagaaaggaatgacgatccgtcaggctctgaaatccgcatttgatccactccttcagaaggagcagagaatgaatgaaatctgtgatatgcttggaacagcagatgaggaagaaatgaatgcgttgatggaagaacttggtacgatccaggatgaactgacactgcatgatttctatacgattgatgcgaaggtagaagaggttgcgcgtgcacttggattacttgatcttggattggatagagatgtgacagacttaagtggtggacagagaacgaaagtgcttcttgcgaaacttctccttgagaagccggatatcttgcttcttgacgagccgacaaactatctggatgaggagcatattgcatggctgaagcgttatcttctggactacgagaatgcatttatccttatttcacatgatattccgttcttaaatgaagtcgtgaatattatttatcatatggaaaatcaggaattgaaccgttatgtgggcgattatgatcatttccaggaagtttatgcagtgaagaaagctcagcttgaagcggcttaccgtcgtcagcagcaggaaatcagcgagctgaaggactttgttgcaagaaataaagctcgtgtgtctacaagaaatatggcgatgtcccgtcagaaaaagctggataagatggatgtgatcgagcttgcggcagaaagaccaaagccggaattccatttcaaatatggaagaactcctggtaagatgctttttgagacgaaggatcttgtgacaggatatgatgaaccattatctaaaccgttgaatttctctatggaacgtggacagaaaatcgcacttgttggaacaaatggaattggaaaaaccacattgctgaagagtattcttggattgattccttctttagcaggaagtgttgaacttggtgataaccttgaacttggttattttgagcaggaagtaaaaggagaaaaccgtaatagttgtattgaggaactgtggcaggaatttccttcttatacacagtatcaggtgcgttccgcgcttgcaaaatgcggacttacaacgaagcatatcgaaagtcaggtgcgtgtactcagcggtggagagcaggcaaaggtgcgtctctgcaagttgttaaacagagatacgaatttccttctccttgacgagccgacgaatcatcttgatgtggatgcaaaggactctctcaagcaggcattacaggagtacaagggaagtatccttctgatctgtcacgaacctgaattttatcaggatgtggttgatgaagtgtgggatatgagccagtggacaacaaaagtattctaaaaattgcacaaatagaactgcatgtgaattatgcaataatcacgaaaatgtttgaaaatttaaaaatctcttaaaataatactgaaaaaatgttatactacacacgtagagtctgttataaaaagggcagtacattgtggacaacaacagtgtaaataaaaagaacaggaggttttgaaaatgctcagcagaggagacgcagttgtatataagtgcagaggagtgtacaaggtagaagaagtaggaaaactggatttttcatttgtggatggcaagaaagattattatacattacaatccatagacaatcagagagataaggcgtatgttccgattgatgatgagaagaacatccgtcgtccggtaagtgagcagaaagcgaaggaactgctggataatcttgcagaggttggtatactgaatgtaaagaatgaaaagtacagagaacaggaatacaaggattgtatctcaagcttctgtcctgaaaactgggtcaaagtgctgaagacattgtatagccgaacgaaacgaagaggcagcatgacaagcatggataagaaatatcagctgcttctggaacatgctctttcaagtgaaatgaattatgttcttggaattccggcaggcgagatgacagaattgatcaaaaagagtgaatagttactagaatttaatagaaagaggtccgaagctacggaaaatcaggatttttcattcaatagctgtcgggcctggacttgcgaaaaaagcatgtgcatgatatacttctcctgaatctattattttaggagaagtttttcgtttttttctagtagattgtcaagaaagcgaacgtaccgaaaggagaacaacaatgaagatgctgtcgattgagcaggaacttaagagtaactcttatccaggaagaggaattattattggtaaaagcccggatggaaagaaggctgtcactgcctattttattatgggacgcagtgagaacagtagaaaccgtgtgtttgtagaggacggagagggaatccgtacacaggcatttgatccatcgaagcttacagacccaagtttgattatttacgcaccggtcagagtattgggtaataaaacgatcgtaacaaacggggatcagacagatacgatttatgaaggaatggataagcagcttacttttgagcagtctcttcgttctagagaattcgagccggatggtccgaactacacaccacgtatttctggtgtgatgcatattgagaatggcaatttcaattatgcaatgtcaatcctgaagagcaataacggaaacccggatagttgcaacagatatacttttgcatacgagaatccggcagccggtgaagctcattttattcacacttatatgcatgatggcaacccgcttccaagctttgagggagaaccgaagctggtagaggtgctggacaacatggaagagtttgcagaccttctgtggaacagcctgaatgaggaaaataaagtgtcattatttgtccgttacattgatatcgagacaggtaactatgagacaaagatcgtgaataagaacaaataaggagcgtaaagacagatgaaagaattagaattgaaatacggatgtaacccgaaccagaaaccttcaagaatttacatgaacgacgacagagagcttccaatcaaggtgctcagcggacgtcctggatatattaacttcctggatgcgttcaatggatggcagttggtatcagaactgaagaaagcaacaggacttccggccgcaacttcattcaagcatgtatcaccagccggagcagctgttggtcttccattgtcagagacactggcgaagatttactgggtagatgatcttggagagctctctccacttgcatgtgcttatgcaagagcgcgtggcgcagaccgtatgtcttctttcggtgactttatttctctgtctgacgtctgtgacgttgatacagcgcgcctgatcaagagagaggtatctgatggagtgatcgcaccgggatatgagccggaggcacttgaacttctgaaacagaagaaaaaaggaaattacaatattattcagatcgatccggattatgtgcctgcaccgttagagcacaaggaagtattcggagttacatttgagcagggaagaaatgaactgaatatcgataaagatttcttctcaaacgttgtgacagatgtgaaagagatcccggatgcagcgaagatcgatcttgctatttccatgattacactgaaatatacacagtctaactctgtatgttatgtaaaagatggacaggcaatcggaatcggtgccggacagcagtcaagaatccactgtacacgtcttgccggacagaaggcagataactggtggttacgtcagaatccgaaggtacttggacttcagttcaaggatggaatcggacgtgcagacagagataatgcgatcgatctttacatcggagaggaatatatggatgttctcgcagatggtgtctgggagaatacatttaaggtaaaaccggaagtatttacaagagaagagaagagagcatggttggaccagctgacaggtgttgcgcttggttctgatgcgttcttcccattcggtgataatattgagcgtgcacataagagtggtgtaacttatattgcacagccaggtggatctgtgcgtgatgataatgtaattgctacatgtaacaaatacggcatggcaatggcatttacaggaatccgtctgttccatcactagaaacttaagataagatgataaaagaaccgggacttttggtgaagaaccggcggtatagaaaggctgaaatattatggtgatagagacaagaagcccggaagagacatttgcagtcggtaaaagtcttggtgaaaaagcattcccaggtcaggtgttaaccctgacaggggatcttggagttgggaaaacggtctttactcagggacttgcagaaggacttgggattgaagaaccggtgaatagtccgacatttaccatcgttcaggtttatgaagaagggcgtctgcccttctatcattttgatgtctacagaatcggtgacattgaagagatggacgaggtgggatttgaagaatacgtgatgggagaaggtgtctcactgatcgagtgggcgaatctgatagaagagattcttccggaacgtcggacaaatattctgatcgagaaggatctgacacagggatttgattatcgtcggatcacaatcgaggaacaataacgataaaaaattagaagaatggaacaaagagaaggctgttgatacagagaacatttttacagcagctgacagaggaaggaagcaagaccatgagagtattggcgatagacagctcaggactgacagcaacggttgcagtcgttgaggatgaacagacaattgcggagtataccgtgaattataagaagacacattcgcagacacttctgccgatgattgatgaggtaaagaagatgatcgatctggatctgtccagcattgatgctattgctgtgtcaggaggtccgggctcttttaccgggcttagaatcggatctgctactgcgaaaggactgggacttgctctcggaaaacctctgatccatgttccgacagtggatgcactggcctataatgtttatggatgtggcgacttgatctgcccaatcatggatgccagaagaaaacaggtttatacaggattgtattcattttcacatgaagtgaaagatggaacacatctgacagaggcagcatttcatgtggaagaacagcagatggcgattgcagtagaagagttgatcagtaagctgaatgcgtataaacgtccggttgtatttttgggagacggagtaccagtgtatcgtcagatgcttgaagagggacttgaagtcccgtattcatttgccccatcatacatgaaccgtcagagagcggctgtagtaggagcacttggtattgcgtattattatgcaggaaaatatgagacagcagaggcgcataagccggattatctgcgtgtgtctcaggcagagcgcgaacgtgctcagcgtgaaaaggaagcaaagacagaagtgcgtgagatgacgattgaagacggtgctgtagttgctgagattgagcaccagtcattttctgatgcctggagcgagaaggcgattctcgagacactggaacagaacaatagtgtctgctttgttgcggaaaaagcagggaaaagagtaggatatctgcttggctatactgcggttgatgaagtggagattgcaagaatcgcagtgattgatgagatgaaacgtcagggggttggtcatgcattaatgctaactttgaaggcgtggagtaaagaacatcagattgcaaaggttctgctggatgtaagagaaagtaatcaggcagcaggagcattttatgcgagagaaggattcgtaaacgatggagtccgcaaagcattctatcaggatccgaaggaagatgcagtactgatgagtctggaaatagataaataaccagcagtttccagtggaaattgcgaaaactgttttgtataattgaggcgtaacaaaggaagaaaacaggaatattccgtttttgtaaattacaatgatgagtaacaacataattgctgctcacaggaggaaaacgtatgcgccagtatcagttgaaagaaacaaaagaaattacgaaaattatttgtaaccggtgtggaaaagaaacaaaagttgtgagtgggattccgaaaagagagatgcttcatgtagagcatacctggggttatttttctggaaaagatggagaaagctgcagttttgatctgtgcgaggagtgttttgatgaaattacaaaggggttcctcattccaaccgaatgtaaagatgaatgaaagagtctggcttgcagtttcgggcaaaccgtaatggaccagaagatagaggaatattatgttagatgtatgtttgcttggaagtggtgggatgatgccgcttccttatcgtttccttacttccttaatgacaaggtttaacggaagcagtctgatgattgactgcggagaaggaacacaggtagctgtaaaagagaagggctggagttttaaaccaatcgatgtgatctgttttactcattatcatggggatcatatcagtgggcttccgggtcttctacttacaatgggaaatgcagaccgtagggaaccgttgacactgatcggaccgaaaggtcttgaaagggttgtcagttgcctgcgcgtaattgcgccggaactgccatttccaatcatttatcaggagattcagggagcggagcagacatttgagttaaatggataccggttgaaagcatttcgtgtgaaccataatgtactttgctatggttatacgattgaaattgaccgcgccggtaagtttgatgtggagcgtgcccgtgcaaatgagattccgcagaaatactggagtcgcttacagaacggagaaactgtagaaagtgaaatgggaattttgacaccggatatggtgctcggtccacagagaaaaggaattaagctgacttatacaacagatacaagaccgacagattcgattcgtgagaatgcgaaagattctgatcttttcatctgtgaaggcatgtatggagagaaagagaaagcagcgaaggcagtagagtataagcatatgacattttatgaagcggcggaactggcgaaagaagcgaatgttggcgagatgtggctgacacattatagcccgtcacttacaaagccggaacattatatgaatgatgtgaaaaagatattccctcgggcgaaagctggaaaggatggaatgtctgttgatctgatgtttgaagattgagagggatagaaaatgagtgaaagcaaagagattaatatactggcgatcgaaagttcctgtgatgagacagcggcagcagtagtacgaaacgggcgagaagtgcgctcaaatatcatttcttctcagattgatctgcacaaattatacggtggtgttgtgccggaaattgcatcaagaaagcatattgagaagattaatcaggtgattaaagaggcgcttagtgaagcagggacaacattagatgagattgacgcaatcggtgtaacttatggaccggggcttgtaggagccctgcttgttggcgtggctgaagcaaaagcaatcgcatgggcgaaagatattccactggttggagtgcatcatattgagggacatatttctgcaaattatatcgaacatccggatcttgagccaccgtttgtgtgtcttgttgcatccggcggacatacgcatcttgtatgtgtgaaagaatatggaaaatatgagatcctcggaagaaccagagatgatgcagcgggtgaagcttatgataaagtggctcgtgcaatcgggctcggttatccgggcggtccaaagattgaccgtattgccaaagaggggaatccggatgcaatccagttcccaaaggcaaaggtaaatgatgcagagtatgattttagtttcagtggactgaaatcagcggtattgaattatattaatggctgtaagatgaaaggtgagacatttgatcctgcagatcttgcagcatctttccagaaggcagtagtagaagttcttgtgggtaattcaatgcgtgcagtagaaaaactcggcatgaagaaatttgcgattgcgggaggagttgcgtctaattcagcacttcgtgaagcgatggaagaagcttgtgagaaacgtggaatgaaattctaccgtccgtcaccgatttactgtacagataatgcggcaatgatcggagcggcggcttattatgaataccttgccggaactcgttcgggatgggatttgaatgctgtgccgaacctgaaattgggtgaacgttaagatagttgatttacgtgtcagttatttgaataacaaagagatatgaacaggattttgtgatgagttgtgaataactttgcaaaatcctgtatttaatgtgaataacaggagagaaaaatggagaagaaatattgtacagcggttgttcttgctggcggaagtggaaaaagaatggggacaaaagttcataaacagtacttgatgctgaaaggttatcctgtactttattattctctgaaagcatttcaggattctgcgtggattgatgagatcgttcttgtcagtggcgcaggggaagaagaatactgccaaaaggaaattgtagagaaatacagtttttctaaagtgcataaaattgtagccggaggtgcagaacgttataattctgtctggaatggtctgcagcagatcacagaaaaagacgggttcgtatatattcatgacggggcaagaccgtttgtggatgatgcgatgattgagcgtgcttatcgatgtgtggaagaaacaaaggcatgtgttgccggtatgcctgtaaaggatacgatcaaagttgtagatgaaaagaattatgtgaaaggcacgctggagagaaaaacactctggcttgttcagacgccacaggtttttgacgttcagctgattaaagaggcttatcagaaattaatcaacgagaaaattgaaaatgcgacagatgatgcgatggtagtcgagcagatgatgggacatactgttaaattatatcccggagcatatgaaaatataaaaatcacaacaccggaagatcttcttgtggcggaagcgtttctgtaggaagatgcaagaaaattcaagaaaagagggggattttccgatgttgtaaagtgtggaaaaagccccaaaaatcaaggaaaacaaagaaagttaaaaaaatgtgaaaaaaatgaaaaaaaggtgttgacatttaggtccaccttatgataagattatcagcgtcgcaagtgaaacgacaacaacttaataagaattgctaatcggcaatgattaggtattatggagaggtatcgaagtggtcataacgaggcggtcttgaaaaccgtttgtccgaaagggcgcgtgggttcgaatcccaccctctccgttttttatggagaagtacccaagctggccgaaggggctcccctggaaagggagtaggtcgttagtagcggcgcgagggttcaaatccctccttctccgtttgttttatgaaagctcataaaactttttaaaaaagttcttgacaaacaaaaacagctatgttaatataaacaagctgtcgcttgaaaagaacgacacaaacaaagaaccttgataactgaacaatagacaacaacaacccttgaaaatttctttaagagaagatttttaagaacggtttttaaacaaaccaaaacaacagtaaaaagggaagaattagctagttagttggttctgaactggatacaaacacttttaacgagagtttgatcctggctcaggatgaacgctggcggcgtgcttaacacatgcaagtcgaacgaagcaccttgatttgattcttcggatgaagatcttggtgactgagtggcggacgggtgagtaacgcgtgggtaacctgcctcatacagggggataacagttagaaatgactgctaataccgcataagaccacagcaccgcatggtgcaggggtaaaaactccggtggtatgagatggacccgcgtctgattaggtagttggtggggtaacggcctaccaagccgacgatcagtagccgacctgagagggtgaccggccacattgggactgagacacggcccaaactcctacgggaggcagcagtggggaatattgcacaatgggggaaaccctgatgcagcgacgccgcgtgagcgatgaagtatttcggtatgtaaagctctatcagcagggaagaaaatgacggtacctgactaagaagcaccggctaaatacgtgccagcagccgcggtaatacgtatggtgcaagcgttatccggatttactgggtgtaaagggagcgtagacggagtggcaagtctgatgtgaaaacccggggctcaaccccgggactgcattggaaactgtcaatctagagtaccggagaggtaagcggaattcctagtgtagcggtgaaatgcgtagatattaggaggaacaccagtggcgaaggcggcttactggacggtaactgacgttgaggctcgaaagcgtggggagcaaacaggattagataccctggtagtccacgccgtaaacgatgactactaggtgttgggcagcaaagctgttcggtgccgcagcaaacgcaataagtagtccacctggggagtacgttcgcaagaatgaaactcaaaggaattgacggggacccgcacaagcggtggagcatgtggtttaattcgaagcaacgcgaagaaccttacctgctcttgacatctccctgaccggcaagtaatgttgcctttccttcgggacagggatgacaggtggtgcatggttgtcgtcagctcgtgtcgtgagatgttgggttaagtcccgcaacgagcgcaacccctatctttagtagccagcggtttggccgggcactctagagagactgccagggataacctggaggaaggtggggatgacgtcaaatcatcatgccccttatgagcagggctacacacgtgctacaatggcgtaaacaaagggaggcagaaccgcgaggtcgagcaaatcccaaaaataacgtctcagttcggattgtagtctgcaactcgactacatgaagctggaatcgctagtaatcgcgaatcagaatgtcgcggtgaatacgttcccgggtcttgtacacaccgcccgtcacaccatgggagtcagtaacgcccgaagtcagtgacccaaccgtaaggagggagctgccgaaggtgggaccgataactggggtgaagtcgtaacaaggtagccgtatcggaaggtgcggctggatcacctcctttctaaggaagaaatgctttctttcgtctggaacaatccaactaaaacggaagaaagaagtagagagtttttactgttgtctattgttgggttatcaagtaacctaaaccttttggtggcgatgcgcttaggggtaacacccgttcccatcccgaacacgatggtaaagacctaagcggccgatggtactgcactggagacggtgtgggagagtaggtggccgccaaattaaaaagaaaataaaccgagaggttctgcgataaagctggtcttcaccagtgatcagagtttaaaagaaagcttttagtctctgatgactgatgaaaaagtcagtcggatgaagaactgaataaggacttcatcttatgtaccttgaaaactgcatatagtaaaaatcaatagatttagataaatatctaatcaagacatccgaggtaatgttaacaacattaacttacagtctgaagaaaacagacttaaaacaaattgactatcaccaacgcatacaacgctatgtatgtgtggacgttatcccattcccgtgggatgaggtcgagttggttatgctgataagagcgtatggtggatgccttggcactaagagccgatgaaagacgtgataagctgcgaaaagcttcggggaggagcaaatatcctttgatccggagatttctgaatggggaaacctacttgagcaaacctcaagtatccttaagccaatacataacttaaggaagggaacccggtgaactgaaacatctaagtagccggaggaagagaaaacaacatgtgattctgtgagtagcggcgagcgaaaacggaagagcccaaaccagcgtgcgtgcatgctggggttcggaccgcggaattgattcaacgagtttagcagaacggttttgggaaagccggccagagagggtgaaagccccgtaagcgaaagacgagttgacatggcgggatccagagtaccacgagacacgtggaaccttgtgggaagatgcggggaccaccccgtaaggctaaatactacttagtgaccgatagcgcatagtactgtgaaggaaaggtgaaaaggaccccgggaggggagtgaaaaagaacctgaaaccatatgtttacaagctgtggaagagctttatatgctcaaccgcgtactttttgtagaacggtccggcgagttacgctggctggcgaggttaaggactaaaggtccggagccgaagggaaaccaagtctgaatagggcgcatagtcagtcggagtagacccgaaaccgggtgatctatccatgtccaggttgaagttgccgtaaaaggcaatggaggaccgaacccacatccgttgaaaagggtggggatgaggtgtggataggggagaaattccaatcgaacccggagatagctggttctcctcgaaatagctttagggctagcctcatacgagtcttgcggaggtagagcactgaattcctaagggggcgtcaaagcttactaagggatatcaaactccgaatgccgtgtagatgatgtatgggagtcagacgatccgagataagttgggtggtcaaaagggaaagagcccagaccaacagctaaggccccaaaatgtgtgttaagtggaaaaggatgtgggatttcgaagacaactaggatgttggctcagaagcagccattcattcaaagagtgcgtaatagctcactagtcgagaggtcctgcgccgaaaatgtccggggctaaaacacactgccgaagctttggaattgagaattcaattggtagaggagcattcttaaagggacgaagcagtaccggaaggagctgtggacttttaagaagagagaatgccggaatgagtagcgagaggaaggtgggaatccttccggccgaatatctaaggtttccagagtaaagctgatctgctctgggtaagtcggggcctaaggcgaggtcgaaagacgtagtcgatggataacaggttgaaattcctgtactatcctgtaacagaactgtggggacacaggcagagagcgtgagccgggaatggaaagaccggtacaagcgaggtaggagaagagttggcaaatccgctctttaatctgaagacgtgatgtggactgaaaataagtagggaagcacgtgagttgactgtcaagaaaagccgctattgtttgcaggatacccgtaccgtaaaccgacacaggtggatgaggagagaatcctaaggccgacgggagaagcattgttaaggaactcggcaaaatgactccgtaacttcgggagaaggagtgccagtaagatggccgcagagaattggcccaagcaactgtttagcaaaaacacaggtctatgcaaaaccgaaaggtgaggtatatgggctgacgcctgcccggtgctggaaggttaaggggagaggttagcgcaagcgaagctttgaacttaagccccagtaaacggcggccgtaactataacggtcctaaggtagcgaaattccttgtcgggtaagttccgacccgcacgaaaggcgtaatgatttgggcactgtctcaacaatgcacccggtgaaattgaaataccagtgaagatgctggttacctgcgccaggacggaaagaccccatggagctttactccagcttgatactgggattcggtattgcatgtacaggataggtgggaggctaggaaatggtaacgccagttgccatggagccaatgttgggataccacccttgcagtactgggtttctaaccagcagccgtgatccggctgggggacaatgtcaggtggggagtttgactggggcggtcgcctccgaaagggtatcggaggcgctcaaaggttccctcagaatggttggaaaccattcgaagagtgcaaaggcagaagggagcttgactgcgacaccgacgggtggagcaggtacgaaagtaggacttagtgatccggtggtataaagtgggattgccatcgctcaacggataaaagctaccctggggataacaggcttatcactcccaagagttcacatcgacggagtggtttggcacctcgatgtcggctcatcgcatcctggggctgaagtaggtcccaagggttgggctgttcgcccattaaagcggtacgcgagctgggttcagaacgtcgtgagacagttcggtccctatccggcgtgggcgtaagatatttgagaggagctgtccttagtacgagaggaccgggatggactggccgctggtgtatctgttgtcttaccaaaggcatagcagagtagccaagccgggaagggataaacgctgaaggcatctaagcgtgaagcccccctcaagatgagatatctcataacgtcaagttagtaagaccccttgaagacgacgaggtagatagggcagaggtggaagtgtggtaacacatggagctgactgttactaataggtcgagggcataaccaaagcagtgataggtttggatgatgatgttggttttgactgtatgtagttttgaaggtacataacctttaattaaatattcctccttagctcagtcggtagagcattcggctgttaaccgaagtgtcgttggttcaagtccaacagggggagcttgaagatcttgcagaaatgtaagatctttttattctttgattatcggatcaggagtaggaaactaagaagttcgatttgtcgaattatttgaaaagtttcaaaaattaaaaaaatatcaaaaaagtacttgccaaacggtgatttatatgatatgattataatcgctgttgaggaagtcgacagacaaagtatggccccgtggtcaagcggttaagacatcgccctttcacggcggtaacacgggttcgattcccgtcggggtcatttatgccgatgtggctcaattggcagagcagctgatttgtaatcagcaggttatcggttcgagtccgatcatcggcttgttcttaggaacagaaataatcaattggacctttagctcagttggttagagcaaccggctcataaccggtcggtcctgggttcgagtccccgaaggtccatttagctagactgcttggaagtagtaaggggcagcgagctgacaattaaatatttggcccagtggctcagttggttagagcgccgccctgtcacggcggaggtcgagagttcgagtctcttctgggtcgttcaagatgcgaaagcattttgaggaatgccgcagtggcggaactggcagacgcccgggacttaaaatcccgtgggtagtgatacccgtaccggttcgattccggtctgcggcattatttttttctctgagatttttgtgaagttaatgtttgcaagaatctcagagttttttgttttatgcattccatttggaggtaaggatattattcaaaaaataacggcattgcatctcctcttacgagatgcaatgccgttattttgaagtcttcacactttcattaaaaagtggacctggcgggaatcgaacccgcgtccaaaaacctgtcccatgtacttctactatcatagtcagttatttaacattccctctgccgtacgaaaactaacatccttacgggttcagtagcttcataatacgcctgacagctcaaagctttgccgtcatcgtttctcacatagtcggtgccagattcctaaagtgtgagtgcttcagggctgacatgcagcatttaggctgcagctaattcgaaattatcgttagcgtttaattttaagtttgcgatttaacgcatcagcctacggatagcttctccatcttcgagatccctgtcgaaaccagtacaagccctgatcagggtagagtaatgaatactctctactgtaacagacacattctcttgtgtgctgtacatactaatatagtaaaaagaaatataaatgtcaagtgattattgcgttaaaagaagtgaaaaagcagtaaaaatttagcatttttaatgtcatttcacatattttttataaagataattactgtcagacagggaagaatgtgttaatataataatatgagtaattataaatcttaacaagaaaattcggaaaaaggagaggtttcttatgccaacaacatacgcacattataaattcggaaaagaggtgctcagcgcacttccaagaccccttcagaattctatagaagcgcatagagagttgtttgatattgggttacatgggccggatatcttattttattataatgcattaaagaaagatccggtgaatgaacaggggcatacacttcatgaacaatttgccgatgagtttttccatcatgctgttgaagtgattgagaaagtaaaagatccggcagcggcgcgtgcatatatttatggatttatctgtcattttgctttagacagtgaatgccatccttatgttgaaaaaattatgcaggtaggaagagtttcacacaatgagattgagatggaactggatcgaatgatgctgacggaagattatcatgatcctttgcgctatctgacagcgaagcatattcatcctaagatggagtatgcggaagtgatcgcaccatttttcaaagatgtaacagccgagcagatctataaggcattaaaagggatggttttttatcataagctgtttctggcaccgacatctggaaagcgaaaagcgttgtttcttgggatgaaggtagtggggaaatacgattcattgcatgacatagtgatgagtgtaaagccagatccgttatgtcagaaatattgtaaggttttgaaacggcaatattcaggtgcggtgccgttagctgcgagtctgatcgtacagtatcagaagaaattattccaagacacaccgcttccggaacgttttcatgagacattcggtgcaggagaagagtgggagaaactgcgtctgtagagaatcgaagaaaagagtaacagactgcttgccaggagagatgcagaagaagagaaaaagagtcaggagaatgtagatgaaggaattcgttaaagtgcaggatatcacgaaaacttataaaatgggtgaagttgagattcatgcagtggatcacatcagcttttcgattgagcagggagaacttgttgtaatcgttggaccaagtggtgcaggtaagacaactgtgcttaatattctcggaggaatggatacggcaacaagcgggaagctgtatgtagatggaaaagatattacagcttataattccaaacagctgacaggataccgcagagatgacatcggatttgtttttcagttttataatcttgtgccgaatctgaccgcattggaaaatgttgagcttgcgttgcagatcagtaaggatccgttggatgcacaggcagttttggaggaagttggtctgggggaacggaagaataattttccggcacagctttccggcggtgagcagcagcgagtttcaatcgcgagagcattagcgaagaacccaaagcttttgctttgtgatgagccaacaggtgcattggattacaatacaggaaaatcaattttgaaattacttcagaatatgtgtagagaaaagggaatgacagttattatcattacacataatcaggcacttgcgccgatggcagatcgattgattcatataaaaaatggacaggtagcaagaatggaatctaatgagaatccgacttcgattgatgaaattgaatggtaggggatgtggatgaagaaagcattacgaaaaaacttttatatggagatccgtcatagccttggacgttttttatccattttctttattgttgcgataggatgtgcattcttttccggaatccgtgcatcagagccggatatgagatattcaggagatgcatatttcgatgagaagaacctgatggatattcaggtaatgagtacaatgggactgacagaagatgatctggatgcaattcgtgctgtggatggtgtattggatgcagaaggaagctatgcaacagatgtactttgtacgattcggggaaaccaggtagcagttcatgttatggcgctccaggataagatgaatcaagttcagttagaagatggcaggcttccggaaaaggaaaatgaatgtgtaatagatgcagattatctggatggaaagaatctgaagattggggataagatcacattatcgagtgggacttcggattctttggaagatacacttaagacagatacatttaccattgttggtacggtcagcagtccggagtatattgcatttcacagaggcagtacaacaatcggaaatggaagtgtcagtgcctttctttgcgttccggagaaagcattttcattagatgtgtatacagagattacagtgcaggttgaaggtgcaaaggaagcgactgcatttacgaaagaatatgaagaacatgtggattctgtgctgaaaaaggttcaggcaattaaagcggaaagagaacaggccagatatgatgagattacttcgacagcgcaggaaaaagtggatgaagcacaagaagagttagctcaggcagagcaggatctggcggatggaaaagaagaggcggaagaagaacttgcaagtgcaagagagaaacttgatgcagcgcagaaagaacttgaacgaggaagaaatcagctggcagcttcgaagcttgaactggagcagtcgagaaattttctgatatcaaagcaaaaggagctggatcagtccaaagcacaagttgagcagggagcacaggaacttagcgaaaaacagattgcacttacaacattaagaaatcagctggcacaactgaaagagcaggaagaaagtctggaagatcagagacaagaacttttagcgcaacagacacagatgcagcaaaagaaagacgagcttctgaaagcaaaggaagaattgcagcaacaggcagaagactatcagtctgcgtatcagcagatttatcagccgttgaaacagtcttatgaagaactaaatacacagtatgaacttcttctacagaactatgaggcactgaaagaagaatacgatcggaagcaggaagcaggagaagaagatccggaattaaaggctcagttagaacagttggaagctgaaaaaacagcaatggaagagaagttgactgaattgaaagcaaatctggataaaatggaattggagtcgaaagctgccgaagcggagattcagaaaaaccagacaaaaatcgaagccggattgacgcagatcaacgaagggattccagcagttgaagccgggatagctcagattgaagagggtattccggtattgcaggataatatacagaaactgacggatgtgttgacacagggggatgctgcaatccttaccgcaagtcggcagatagatcaggcaaaggcgaagattacatccggtcagcagcagattgacagcggatggcagcagatcagtgagggacagaagaagattgaggaggcacagcagcagttaagcagcggaacaaaggagctggaagacggttgggcagtgtatgaggaaggtcgtatagaagctcagaagaagattgaagatggagagcggcagattacagaagcaagagaagagcttgcgaaagcacagcagaagattgatgatcttgaaaagccaaagtggtatgtttatgatcggaacaatctgacagaatacagcggatacggagataatgcagaccgtatgcgggcaatcggtaaagtgttcccactcattttcttccttgttgcagcattgatcagtctgacaacaatgacacgaatggtagaggaggagagaacgcagatcggtactttgaaggctctcggatatggaaatgcttcaattgttggaaaatatctctggtatgcgatccttgcgacattaaccggtggtgttttcggaattctgattggagaaaagataattccatatatcattatcactgcatataagatcttgtatcgtcatatgtatgatgttgtgatcccgtataatttgtattatgctgtaacagcatgtgcagcggcacttgcatgtacagtaatcgcaacactgttctcatgtatgaaagaattacgagagcaggcagcagaattgatgcgtccgccgacaccaaaacagggaaaacgagtatttctggaacgagttccgtttatctggaaaaatctgaattttacatggaaatcgaccgtgcgtaatctggtgcggtataaaaaacgcttcttcatgacagtatttggaattggcggttgtatgggtatgatgttgtttggttttggattaaaagattctatttcagcaatcgttccgcttcaatacgaacagattcagctttatgatggagacgttattttaaaggaagatgtgacagaagaagagagaattgaggttcagaaagaactggatacggataagaaggtatcagtaactgcagaaaatcttttgaaaaatattgagatcagttcaggagagtcttctcaggaagtttatttagatatacccaaagatgtggaagcattcaaaaagtttgtcgtgatccgggatcggaagacaaaagaaatttattcattggatgataaaggagtaatcctgactgaaaaagcagcgaaactgctggaagtcaatgtcggtgataaattaacgattgatacagatgatggagagaaaacagtcttgatcagtgcaatctgtgagaactatatgggacattatctctatatgacatctgaagtctatgaaaagacattcggtgaggctccggcctataattcaatttattatagaactcaggatcgtacaacagaggaggcaaaggatgtcggcgaaaatgtaatgaagtgtgatggaacacttagcatcagctatacgacaagcctgaaaaagcaggtggatcatatgttggagagtctggacattgtgattattgtattgattatttcagcaggaatgctggcatttgtagtgctgtataatctgaataatattaacattacagagcgcaagagagaactggcaacattaaaggtacttggattttatgacaaggaagtttcttcttatgtttacagagagaatatcctgctgaccttgattggggcactggcgggattgttgatcggaaaaattctgcaccgctttattgttgagacagtggagattgattcggttatgtttggacgaaatatcgatccaccaagtttcctgtatgcctttcttttgacagtggccttttctttgtttgtcaatggagtgatgtattttaagttaaagaagattaacatggttgaatcactcaagagtgtagaataagacagatttgtcaggaaatataataacgaacataataatggattgcagagaagctgcatggaacatagatataattgtgaaatgttccatgacagcttctttgttgttgacggccgcatatagcgtaagcagcaaccgcacgtagcatgaacagtaactttttgttaaaaagcacttgaaatatacctgtagggggtatatattaataattagaaaatataccccctgggggttatacgataggagaaatacaatggaagaaaagaaagtctgtccgggatgttgtcacaagacaaaggatcgcccggaaaaagaatataaagatctgatgaatcgtctgagtagaattgaaggacaagtcagaggagttcgaaggatggttgaagaaggcgcgtattgtccggatattctgattcaggtatctgcggtgaatgcggctctgaatagtttcaacaaagtgcttttggcaaaccatatccggacatgtgtggcagatgatatccgggatggaaaagatgaaacgattgacgagctcgtgacgacacttcagaaattgatgcgataaaagatctgaagagagatctggcacaaaaagtccggatcacaacttgaaggaggagtaagatggaacaatataatgtgacgggaatgagttgtgcagcctgcagtgcccgtgttgagaaggcagttgggaaagtccccggagttgagaactgttcagtcagtcttctgacgaattccatgggagtggaaggcacagcaacagtagatgcggtcattgcggctgttgaggaagctggatatggggcaacgttgaaatctgcaaagaatgaagggcatgggatgaatcaaagtgagcagaactgtgcggaagatgcgttgaaagacagggagacaccgaagatgaaaaggcgtctgatcgcttctttgtgttttttgattccgctcatgtatctgtcaatggggcatatgatgtggggctggccacttccggtatttctggaaggaaatcatgtggcgatggggctggcgcagctcctgttaacgacaatcgttatggtgatcaatcagaagttttttatcagtggatggaaaggcatgatccatagagcaccaaatatggatacgctggttgcacttggtgcaggtgcatcttatggatatagcgtgtatgcattattcgctatgacggcagcgcagacggcaggcgatatggatcatgtgatggagctgatgcatgaattttattttgaatcagcagcaatgattttaacgttgatcacagtcggaaagatgcttgaagcgcattcaaagggaaagacaacagatgcattaaaaagcctcatgaagctggcaccaaagacagcaacgctcctgcgtgatggaaaagaacaggaagtttctatcaatcaggtgagaagaggagatcagtttgtagtaagacctggggagaatattccggtggatggaattgttctggaaggaaacagtgcagtagatgaagctgccctgaccggagagagtataccggtagataaagcagaaggggataaagtgtctgcggctacaatgaatcagtcaggttttctgcgttgcgaggcgacgagagttggcgaggatacgacattatcacagatcattcagatggtaagtgatgcggcagcaacaaaagcgccaattgccaaagtggcagataaagtttcaggagtatttgttccggcagttatttctattgcagttgtcacaatgatcgtatggctgcttgtcggagagcctgttggatttgcacttgcaaggggaatttctgttctggtgatcagctgcccgtgtgcattaggtctggccactccggttgcaattatggttggaaatggaatgggtgcgaagaatggaatcatgtttaagacagctgtttcgctggaagagacaggaaagacggagattgtcgcactggataagacaggaacgatcacaagtggagaaccgaaggtgacggatctgctccctgcggacggaatgacagaacatgaattattattttttgcaaatgcattggagaagaaaagtgagcatccgcttgcccgggcaattcttgcaaaggcagaagaaaatggggaagcagagcagaaaagtgaaatcacacagtttcaggccgttccgggaaatggtctgtcaggaaaacttggagaggactggctgtacggaggcaattttaaattcatttctgacaaaatgaagatttctgccagcataaaagaacaggcggaacggttggcacagcaaggaaagacaccgctgttctttggaaggaatgagcagttccttggcatgatcgcagttgcggatgtgatcaaggaagatagtccacaggcagtgaaagaacttcagaatatgggaatccatgttgttatgctgactggagataatgagcgcacagcgaaggcaattggtgagcaggcaggtgtggatgaagtgatcgcaggtgttcttccggaaggaaaagaacaggtgatccgcaagctgaaagaaaaaggaaaggttgcgatggtaggtgacggtatcaatgacgcaccggcactgaccagggcagatatgggaattgccattggagcggggacagatattgcaatcgatgcagcggatgttgtgctgatgaagagccggttaagtgacgtgccggcggcaatccgtatgagccgtgcaacattgcgcaacattcatgagaatctgttctgggcatttttctataatgcgataggaattccactggcagcaggaatctggatcccagtctttggttggaaattaaatccgatgttcggagcggcggcaatgagcctgtccagtttctgtgtagtaacaaatgcattgagactgaatctgtttaaaatgtacgatgccagcaaagacagaaaaagaaagatgaaaaaggtagaaacagcagaaaatactgtttcagatattgtcttagcagacaaaaatgagtcagaaaacaaggaggagacaaagatgacaaagacaatgaaaatcgaaggaatgatgtgtggacactgtgaggcggctgtgaagaaagctctcgaggcacttgagcaggttgatacagcagaagtcagccatgaggccggaacagcggttgtgacactgaattccgaaatcagtaatgaagtgctgaaaaagacagtcgaagacaaagattatacagtaacagcgatcgaggattaatgagcaaagaagaggtcccctgcggaaatgaaagattctgcaggggaccttttggattaatccttgtatacaatctttccatcacagattgtatattttacttttccatacaattcccatccggtaaatggagaattagaagacttagaagcataagtctcaggagtccatttctcattcggatcaaacagtacaagatcagctgattttccttctgcgacagaaccgcacggaaggtgatacaggctggcaggattgatcgtcatcttctcaatcagctggcttaatgtcaggtgtcccggacgtacaagggaagtgattccgagagcaagggaagtctcaagaccaataataccgcttggtgtttgtgtgataggacgggatttctcttccgtactgtgtggcgcgtggtctgtagcaatcagatcaatcgtaccgtctttgagaccttcgatgatagcaaggcggtcattttctgtacgaagcggtgggttcatcttggcaagtgcgccgtattttaatacagcttcatctgtcaaagtgaaatgatgcggagttgcctctgcatgcagatttgctcccatagctttaaaggtacgtaccagttcaacggactgtccggagctgatatgctggatcacgacctgtgcaccggaacgaagcgccagcagacaatctctggcaacaagagattcttcagcaatcgaaggagatccgtagatgcccagcgcatcagatacaggtccgtggttgattccgtttgtttcaataaatgcaggatcttcttcatgaagactgatcggaaggtcaagtgccttcgcctcttccattgccttatagagaaaggcagcattcttaagaggaattccgtcatctgtgaatccacaggcaccggcagcggcaagttccttcatagaagtcatctcttcacccttgagtccgcaggagacagcagcagcctggaaaatatggatgtcttccaaagcttcccgttccatcagttctttgagaactggaacagaatcgatgactggtgaagtatttgccatacagatcacggaagtaaatccaccggcagcagctgcaagagatccggtatggagatcttctttataagtaaatccgggatcacggaaatgaatgtgtgtgtcaacaagtcctggagaaatcataagtcctgcagcatcaagctcatcctctccattttcaggtgtcagagttccggcatctgcgagtttctggatcagaccgtctgtgatgcgaaggtcgacaagacgttctgtatcagatgcaggatcaattagaaaaccattttttataagcataattcatcctccttttgctgttaagtataccgtatttttgatagagattcaaatttattagaaaatgtgttatcataaacacactgtaacatgaaaagaaagaaggcagaaaggttgatctttgaattttaccggatccagacaatcgttctgcggaaagaaggagtaaatgaaagaatacgattatctgattgttggagcaggtctttatggagctgtcatggcacatgaattaaagaaaaaagggaagaaatgtcttgtgattgaccgaagagatcatattgcaggaaatatttactgtgaggacatagaaggaatccatgtacataaatatggtgcacatattttccatacgtctgataaaaagatatgggattacatgaatcagttcgcggaatttaataattacatcaattcaccagtagcagtttataaagatgaactttataacctgccatttaatatgaatacattcagtaagatgtggaatatccgcacaccacaggaagcaaaagagattattgaaaaacagcgcaaagagacaggaatcacagatccacagaatctggaggaacaggcactttttcttggcggaagagatatctatgagaaactgatcaagggttatacagagaaacagtggggaagaaagtgtacagaacttccggcatttattatcaaacgtctgccattccgctttgtttacgataataactatttcaatgacagatatcagggaattccggttggcggttatacagcaatcgttgagaagatgctggaagggacagaagttcgcacagggattgatttctttgaattcagaaaagagaatccggagattgcagagaagattatttttacaggaatgatcgatgaatattttggatatcagctgggagcattggagtatcgttctgtcagatttgagacagaagttcttgattgtgagaactatcagggaaatgctgttgtcaattacacagagcgtgaagttccgtatacaagaattatcgagcataagcattttgagtttggcaagcaggagaagacggttatttccagagagtattcatcagaatggagtgttggcatggaaccatactatccggtaaatgatgagaagaataatgcattgtttgaagaatacaagaagcttgcagaaaaggaagaaaatgtaatctttggcggacgactgggagattataaatattatgacatggataaagttgttgccgcagctcttgacagactggaagaattcaattaatatgagagtcacacttcagtcgttctgactgaagaatcaggaaagattctgaagagtagttcgtatcagattctgataattttcaattggacaggtattgtatcgtgtgcggtgtggggccgcacacgtttagacgacagattgcagtagaattaaatatggaaaaaatgtatgaagtacttcgcttcgtggaaaaaggaaccgaatgccagccaagtatcgattgcctgcagggagaacttttgatttattatctgcgggataatacacagttggataaagcggtgttatttgaatggttccgacaaattgccggagaaataagaaagtatcagcagtcgagacgtgggcagaattatcgttgtctgaccccatatagtattgttgtgacagaagaaggagaattgctgcttttaaatccggatgcacaggaaaatgaatttgttatgaagaagatgcagcagaaagcggtgagaagtcattttatccgcccgacagcgtcaggcagcaagaaaaattgttccgtagatttgttcggatatggtaaaattttgcagtttttactggcatatacagagcagatcccggaacttagcagaagtgaagaacgcagactggagcggatcattgaacgttgtaccggtggcggaagacggcattatgataagatcagccaggtgatacgtgatcttccggaggaacgcgaggaatggaatttggaacagaaagtaaaacttcggaatgtcaaactggcggttcttttatttgctgccggggcagtaattgcggcagccggaattgggatgagccggggaagagaaagcaacaatacagttggaaaaagtgaaacggcagtgcaagctcagaaagcagacgatgtaaaagtaataccagaagaacatagtaaaactgaacaggacagaaaaaaagcattggaagatatgaaatggaagaaagagatggaagaacgggttcaagagattctggaatcggtcaaagcatgtgaaaagaagatagaagaaacgacgaaagaagagaataacggggaaaacaaggaagaaacagagcaaacgacagaacagcaaacagaggaaactgtggaaaaatctgtagaagaggaaatacaacaggaaacgaaacaagaagtgataaatgatccggttgttccggaataagaaaaaagtctccataaaagggaggatgccgggtaaccatttactggttcccggcatgtattatgaaaaagtttattcaaagttttttgttttttcctttgatgcttatagtatatgtgagagaaatgaagaaaaagtgataagaagatgaaagatttttaaatgataaatgaacaaattatgaacgacagatgtagtggaaaataacggtttaaaaaagaatggcagtgtggtattctacatctaaagagaacttcggaagttactgttcactcccgtgtcaatcactccgctgattgacacggaggatgcgtgttttgacttgaatgcatctcgctccatcgccaaaggcgatttaaaatggcgagatgcgttgctggtcgcacatcgtgtgaacagtaaccttcggaacaggaggtaacagttgaatatgacaagacaggaatttatccgaaaattacaggaggctttgaatggaaagcttgatgccgcaacaattcaggatcatcttaagttttatgatgattatattatagaagaaatgagaaaaggaaagagcgagcaggaggtcttggaactgctcggagatccgtgggcaattgcgaaaaccattgtagatgcaagtgatggaacagacgaagaagtggtttatgagaacaggagtccattcaataattcgtacaaccagacaacgcaggcacagaacaactatactggttatggacagaaggatgaatatggaacagagcattcttatggatcctatcatgagttcagattagatacctggtggaagaaggctttgctgatccttgcagttgtatttgtagtcgtagtagttgtgtctgttataacaggaatcatcagttttctggcaccggttcttgttcctcttctgatcattatgatcgtgatcagactgatcggtgggaaccgacgatattagaaaaaagaaaagtaaaagaccgatgggggagccatcggtcttttgaggggagtataaataattaataaggggttgtagaaaataatctttctacatgaatcagtataatatatgcatttggaaaaagcaagcaaaatattcaaaatatggttgaaacaaaatgcataaaaagacctccgtttgggataataaagattgtactaaatagttactgtcagttaataagaacagtaacaccaaataaggaggaagtatcatggcaaaaaattatagcaacacaagtaaaaattctcagaatggattctattcatcgaaggaagaaaatcagagtaagaacagaaattcaacatctaattcaggttcgaataagaattccagtaaaaattcttattcaaatcagagtaagaacagcacaaactgcaattctaaaaatgcagatgactgctatggcggaaaagatgattatgatgagtcagacagatattaacagatactgtgagcagtaacgaataagattcttataaacagtaacaaggcagagaagaaaggcaatcgcactttactctgcctttcatttatagtaaaattatgatactgtaaaataagaatcagttaacagtaattaataagtacataaagataatatgaggtagatatggaaagaatggaatggattgcgccgtgtcatttcggtcttgaatcagtattaaaaagggagattcaggatctgggatatgagatcgcacaggtggaagatggaagagttaccttttacggaggagcagatgcagcgtgcagagcgaatgtatttctccgtacagcagaacgtgttctgctcaaggcaggaagttttaaagcagttacctttgatgaattgtttgagaagacaaaagcaattccgtgggagaattatataccgaagaacgggaagttctgggtggcgaaagcttcatcggtaaagagtaagctgttcagcccttcggacattcagtcaattatgaagaaagcgatggtagatcgtcttagaagcagatatcatgtacagtggtttcaggaagatggagcttcttatccactgagagtatttttgatgaaggatatcgttacgatcggaatcgatacatcgggagattctcttcataagagaggataccgtccgtcagccggcaaggcaccgatttctgagacactggcagcagcactgattatgctgacaccgtggagaaaagagcgtatcttagtggatccgttttgcggaagtggaacatttccaattgaggcagcaatgatggcagcaaatattgcaccgggaatgaatcgttcttttacggctgagagctgggcgaatctgattgataagaaactctggtatgaggccattgatgaggcgaatgatctgatcgatgatcagattgagacggatatccagggatatgatattgatggggatgttgtgcggatggcaagacagaatgcagagaatgcaggtgtggatcatctgatccatttccaggagagaccggtcagtgcactgagtcatccgaagaaatatggatttattataacaaacccgccgtatggagagcgtcttgaggagaaagaggcacttcctggtttatatcgtgaatttggcgagagctttaggaaacttgacagctggtctgcatacatgatcacaagttatgaagacgcagaacgttatttcggaagaaaagcagataagaaccgtaagatttataatggtatgctgaaaacatatttctatcagttccagggaccaaagccaccgagaccgaagaaataagaaacgctgtaccagattgttggtgaaaaagaatagaaggtagaaagcaaaatgaagagaagaattgtatttgcaacaggaaatgaaaataagatgaaagagatccggatgattcttgctgatcttggtatggagatcgtatcgatgcgtgaggcaggagtcgatgaagaaatcgtagaagacggaatgagctttgaagaaaatgcagagatcaaggcaagagctgtatcacgagtgctggtcaacgatattgttcttgcagatgattcaggtcttgagattgactatctggataaggcacctggaatttattctgcgagatttgccggagaggatacttcttatgatataaagaacagaatccttctggacagactggaaggggttccggacgatgagcgtactgcaagatttgtctgtgcggttgcagcagtatttccggatggaacaacaagcgtagtccgtgagacgattgaaggacaaattggacacgagattgtcggtgcgaatggattcgggtatgatccgatcttctatgttccggaattcggatgtacaacagcggagatgacaccggagcagaaaaataaattgagccacagaggaaaagcacttcgagcaataaaaatcctgctggaagagaaattgaatgaggaagaagcatgaaaattctgattgtcagtgatacacacggaagacaccaggcactggaccgcgcattagaagaggctgggaaaattgatatgtttatccatcttggagatgtagaaggtggagaagactatctggaggctgtcgtagagtgtgagaagcatattataagaggaaataacgacttttttacagaacttccgagagaagaggagtttgagattggcccttatcatgcatttattacccatggacattattattatgtgtccatggggatggaaactatcatagaagagggcagaacaagaggagcggatctcgtaatgtttggtcatacacatcgtcctttctttcttcagaaggatggaatgacaattttaaacccgggaagtctatcttttccacgtcaggagggaagacgaggcagctatatgatcatggaagtcgatgtggacggaaaattgagttttgagcaaaaatatctataattatcctaattatcagaaaactaaaacaaaagaaacaatttgcgcactcttcttgcaaaaaaacaggtaaaaaacagtcgtaaaaaagtaaaaaaactttaaaaaacctgttgactttctgagaaacatgccatataatatatcttgtcgctgcgggagatacgaaagaaacacaaagccgcaggggcaaggaaataaaactgatatcggggtgtggctcagcttggctagagcgcctggtttgggaccaggaggtcgcaggttcgaatcctgtcaccccgatcatcctgcgggtgtagttcaatggtagaacaccagccttccaagctggatacgtgggttcgattcccatcacccgcttctcgtttgaaaacgagaggttctcattaagagagaaatgagtctgtagctcagctggatagagcaacggccttctaagccgtaggtcgagggttcgaatccccccaggctcgttttgtggtgggtatggtgcagttggttagcgcgccagattgtggttctggatatcgccggttcgagtccggctatccacctttttctttaaatattccaactggccgtgcagtgtcagatatgaagtcttcgatgggctatcgccaagcggtaaggcacaggactttgactcctgcattcgctggttcgaatccagctagcccagttatcctgctagcaggaaagaaataaaaatgaataagggcgtgtagctcaggtggtagagcacttgacttttaatcaagttgtccggggttcgaatccccgcacgctcactggaacaagcaaatcgcttgttctatttttttcttaatcaataattgaataagaaatatgcggatgtggcggaattggcagacgcgccagatttaggttctggtgtttacgacgtgcaggttcaagtcctgtcatccgcagtaaattttttcccggaagtgctgatcaacattgcacttttgggattttttctatctgaaaaccagtatgaaaaaagaagccgcacattaaagtgcaagctccttttctttcttttcccaatcaataaacatcataaagaatgaaattaataacaagaaggaacatccaagaattgcctttgtctggaacagctgaactgctgcattaccgatcactgcgccgacaataaagcaggcaatgattccgtaatacagaagacttgtatccagaaaatgtcgttcttttgtatggaaatagtggtgcaggttctctgttccactgcgcagattaccgatgcacattgtagttgcgattcctttgccatgaatcttgcgaaaactttcaacctgaattccacaggcaaaagaagttaatgcattggccggaagattcaatgctgttgggaagaaactgactgcgatcaggatcagtgcttctgccagaacagaaatctgtctccagtgaagcagatttcctgccttagcccggacaacttcagcaagagcgattccaagtgcaaaggcgagtacagggaaaaggtatttcattgtgttctggaagtctccctgagagagatgtaccccaaagagaagcatgtttccagtctgtgcattggcaaatacttctccacgctccatataagagtaagcatccatgaatccaccggaaagtgcaaggattgctccaagccggatagattcagaaatttgaaatttgtgtttcatagatatcacctcattttcgtgtgtagtacctactgtcatgattgaattactgctttctggcggaaagcagtaataataagccatcaattattatagaagtgacagtagtggctgtcaagattctccgggtgagaactttatatcaaaaaaggtagacaatatgtcgaaaaaaatcgaaaattcacttgcacctccggaataagtggtatatactagtcgagaatgtttgaaattacagtaatctgcattcaggcattgtgcagatttctgtgttggcttttattattactcgtattcgatagacagatggaggtaaaaaacatggtagaaaagaaagtgaagtttatgtcagcggggcagatcatgacattttgcaacacttgtcagaaattaaaatcagacgttgatgtaactgatatggcaaacagaaattatatcatcgatggtaaatcccttatggggttaatgtctattaagctgggactgccaatgcgtgtagttgtgaatggacaggatgaagaagaggcaaatgaatgtttttctaactatgagtttgaataatcctgccggaggcattcttgaataaaagaagagacggtcagtctgtaaatgaagttttgacacacatttatagactgaccgttttgttgttcacaatattgacaaaactatttggtatattaaaaggtaattaaatgtagaagtgatctggtacacgcaaatataagttaggagaaaagaagatggaaagagcaaaaatattagttgtggatgacgagagcagaatgagaaaacttgtgaaggatttccttacaagagaagggtatatagtattagaagccggagatggaatggaagcaatggatcttttttacgaagataaagacattgccctgatcattttagatgtaatgatgccgaaaatggatggctggcaggtgtgtcgtgaggttcgagagacttctaaagtgccaatcattatgctgacagcgcgttctgaggagagagatgagctgcagggatttgaacttggtgtggacgaatatatttccaagccattcagtccaaagattcttgtggcaagagtaaatgcgatccttcgcagaactttgggagcggtcggcaatgattcgctggaggcaggcggtattaccattgacaagtcagcacatatcgtgaagattgatggaacaccggtcgaacttagttataaagaattcgaattgttgacctactttatagaaaatcagggaattgcgctttccagagagaaaatattgaataatgtatggaattatgattattttggtgatgcaagaacaattgatacacatgtgaagaaactgagaagtaaattaggcgataagggcgaatatatcaaaacaatctggggcatgggatataagtttgaagttcagagcgcggagaaataaatcagatgaagaaagcaaaaagagaactgaaatatacgttgagcggacagatgacagctatttttgttggacttctagtgtttgttctgatgttagttttcattgttaatacggggtttcttggacgatattatatgtctcataagcagaaagatctgattgagatgtatgaggaaatgagtgaagcagtgaacaatggaaatcttggaaatgaggcagtgcagaagaaacttgtggcggaacttgaaaaaacgaatattgatgtctgcgcgatggatatttctgacgatggaaaggttgtatttacaaatgtaaaggaagaaggtttcctgtacaaacagatgctccgtattttcttcctgaaagatgatgatcaggaaaagattctcaagcattcggacgattatgtggttcgtaaaatccaggatccacagagcggtacggattatctggaaatgtggggatacttaagtgatagtgtgtttgtcacaatgcgaagcccgttggacagtattcgtgaaagtgccaatcttgccaatcagtttctgatttatcttggaattttcggaatgttctttggaggaatccttgtatggattttttcacgaaggattacaaaaccagtgttggaactggcaagactttccgaagatatggcaaatctgaattttgatgcgaagtatacgagcggcggaaagaatgagattggtgttctgggcgagaactttaataaaatgtcagatcagctggaaaagacaatatctgaattgaagactgcgaataatcagctgcagcaggacattgagcagaaagagaaacttgaaaatatgagaaatgaatttcttggaaatgtttcccatgagttgaagacaccgatcgcattgatccagggatatgccgaagggttaaaagaaggaatcaatgacgacccggaaagtacagagttttattgtgatgtcattattgatgaagcaggaaagatgaaccggatggtcaagaatctgctgacactgaatcagttggaatttgggacagatgaagtagaatttgaacggtttgatattgtgaagcttgtgaaaggtgttattgcaagttgtgatattctgatccaacaggttaatgcgaatgtagattttattgctgatgagacagcttatgtctgggcagatgagtttaagacagaacaggttgtacggaattatcttacgaatgcgattcatcatgtcggaaatgagaagcggatcgaagtgaagatcgtttcaatggatggaaaagtatgtgtttccgtctttaatagtggaaaaccgattccagaagaggatgtaccaaaactgtgggataaattttataaagtggataaagcacatacacgtgaatatggtggaaatgggattggactttcaatcgttaaggcaatcatggaatctttccatcaggggtacggcgtgaaaaattatgacaatggagtcgaattttggtttgaactcgacgcaaagtgtggtaaagtatagaaaatagatactagataatagatactagattacagataagaggtaggctaatgatagcaataattgattatgatgccggtaatatccgcagtgttgagaaagcattgcttgcacttggacaggatgttacagttacagcggacagagatgagatccttcatgcagataaagtgattcttccgggtgtcggtgcatttggagatgctatggagaaattaaaacagtcaggacttgatgaagtaatccgcgaggttacagaaaagggaacaccatttcttggaatttgccttggattgcagcttttatttgagcacagcgatgaggctccgggtgtagaaggacttggaattctaaagggtgagatcttaaggatacctgataaagaaggatataagattccccatatgggatggaattccattcatttagagaatgatggaagactttttaagggaatcgctgagaattcttatgtatattttgtacattcttattatctgaaagcagaagaggaacagattgtcaaggcatcaacagagtatacaatacatatccatgcgtctgttgagaaggacaatattttcgcatgccagttccatccggagaagagcagtgatgtaggactgaagattctgaaaaactttgtagagctgtaggaggagtgcgagaatgtttacaaaaagaattattccatgtctggatgtgaatgccggacgtgttgtaaaaggtgtgaattttgttgatcttcaggatgccggagacccggtggagattgcaaaggcatatgataaggcaggagctgatgaacttgtatttctggatatcacagcttcttcagatgatagaggaacagttgttgatatggtacgaaaggttgcggaatgtgtgtttattccgtttactgtcggcggaggaatccggacagttgatgatttccgtgcattgttaagagaaggtgcggataagatttcaatcaattcttctgcaatcaacagaccggagctaatccgtgaagcggcagagaagtttggaagtcagtgtgtagtagtggcgattgatgcaaagaaaagagcagacggaacaggatggaatatttataagaacggtggacgtctggatgtcggtatcgatgcagttgagtgggcgaagaaagtagagtcccttggtgcaggtgagattcttctgacaagtatggacggtgacggaacgaaggctggatatgatctggaactgacacgtgcgattgctgacagtgtatcgattcctgtaatcgcgtccggtggagcaggaacgttggagcattttaaagaggcattgacagatggcggtgcagatgcggcgctggcagcatctttgttccattataaggaattggaaattaaagaagtaaaagagtatttaagaaatgaaggaatttctgtcagattgtaaagaatggttgaagcagaaagaagagggggacaaaaaatgagtggtttgaacggagactggtatgaggcattgaaaggagagttttctaaaccttattataggaaattatttgagacggtaaacgaagaatacaggacaaaactgatctttccaccggcacaggatattttcaatgcatttcatctgaccccactgaaggatgtgaaggttgtgatccttgggcaggatccttatcataataacggtcaggcacatggattaagcttttccgtgcagaaaggtgtggatatcccgccgtcacttgtgaatatctataaagaactgcatgatgatcttggatgtacgattccaaatcatggatgcctgacaaaatgggccgagcagggagtactgatgttgaacaccgtgctgactgtgcgcgcgcatcaggcaaactctcacagggggattggatgggaagaattcacagatgcagcgattctggcgctgaacagtcaggacagaccgattgtctttattctgtggggagctcctgcacagaggaagaagagaatgcttacgaatccaaagcatcttattctggaagcaccgcatccaagcccgctggctgcttacagaggtttctttggaagcaagccatttagtcagacaaatgcatttctggagaagaatgggattgagccgattgactggcagattgagtaaatcatagtagcaaagtattaaaaatagacgtctgctggccaaagcaaggacgtctattttttatgtgtataattcaaaattaaaacaatcaaactggctgtcgtcagaataaccatcaatcaaagagaaaaatgtctatatttatattgacaaaactaaaaacctagtgtactatctaactatagcactgatacagcaaatgcaaaaaagataaatggaggaattacatggaatataattcaggaagtccaatctatcttcaggtgatcaacgagcttaagaaaaaaatggtaaagggcgagttgaaaccgggtgagaagatgccatcgaacagggagcttgcagttttgtataaagtgaatcagaacacagcggcgagaatctaccgggagatggagatggcaggatattgttacacgaagcgtggaatcggtacatttgtgtcggaggaggagtatatgtttgacaatgtgaagaaggagatggcagaagagctgttgaagaattttgtacacgagatgcgtgatcttggatttcagaaaggcgagattattgagcagattgccgattacgaggaggagcagaaatgatgttagagtacagaaatatcacaaagaaattcggaaataaagaagcagttaaagagcttactttgaagttgaaaaagggcacgatttatggccttctcggagaaaatggaagtggtaagacgacacttatgaagatggcagcgggactgacacagccaacagagggagagattttatttgagggacatccgcttagctatcaggacaaagcatccatcgcatatatgtcaacggaaccatttttctatagttatatgaaggtaaaagatgtagaagaatattatgcagatttctttgaggattttgacagagagcagtttagaaaaacaattgaacgcctgggcttgaatgaagagatgaaagcatctgcaatgtcaagcggaatgaatgccaagctgaaagcggcagcgacattggcgagaaaagcagatcttctcttgttagatgagcctttgaacggtgtggactataaagcgagagaagagatcattgctttgatcctggaagaagcagatgagaatcgtacaatggtgatctctacccatctgattgaagaggtagaaagctttattgaggatgcgatttttataaaagatggacagcttgtggatgtcgtgaatgttgagacagagagaatgacaacgggaaattcacttgcagagctttatctgcagaagatgtaaggagggagtatcgatgggaaaattaatgaaatatgaatggaagaaacagcggacttcgagaatgattgttatggtagctttagctgtctgtgtgcttacattttttggaggtatgctggttgaaaaggatgcattgatgggaatcagtgcaacgcttttattagtcggatcgttttttgtagtgttctatatgggaattgagagtattctgattttaaacagagatttgaaaacaaagcaaagctatatgatctggatgactccgaaatctgtatgggaaattcttggagcaaaatttgttgtagcgatcgcacagatgtttttcgtgtttgcactttatgcgattgccggactgctttgttttgtagggacgatccagtatgtcggagaacttggaaatgtatttgcgatcataagagatggttttatacgagtgtcaggcgaagggcagctgatcgcacagattatctggaatcttctctgcatctttgtcggatggacagaggttgtgatggttggttatcttgcggtaatcgtttctcgaactattttaagggattcaaaatatgcaggaggaatctcaatcgtagctttctttgtgattacatttataatagaaaagatttataatctgatcagcaatgtacttccgaatgtggaagtagcaggaaattcattctttggtgttggatatcttgtatactacattataatctgtgtagcggtatttttacttagtggatggatggcagataagaagcttagtgtataagaatagatagaaaaacactccctgatttgtggcggggagtgttttcgtacatagtgttctttaaataagaatcttcttcatatctttcggtaattccgctgtgaattccatcggctcctttgtgatcggatggatgaaagagagcttccaggaatgtaatgcctggcggtggatgtattccatatccggattatatagataatcaccgacaagtgggaatcctaaatattgcatatggacacggatctgatgggtacggccggtctctaagataagagagacaaggctgtgcccgtttttttcttctacaactttataatgtgtgactgcacgctctccatgcttgaagtctacttttcgctcaatcatggaactgccggtgcgggcaagtggtgcatcaatcgtgccggatggaggtgttacactgccacggacgatcgcgagatattcacgcttgatctcgtgtcgtgcgcccatggaagataggatgctggaactgatcaggtgcttggcaatgacggtcagacctgaagtgtcacggtccaggcggttcgtgcagcggaagataaaaggctttccttgctctgtataataccacattagtccatttgccagagaattctcataattattcagtgatggatggatcggcattccggcaggtttgttgacaacaaggatatcttcgtcttcatatataatgctaagcggcagttcgacaggaggaatattcggtgaactttcattttcctgaatatgtactgtgagaatatctccagtagcaagtagtgaacgcatatattcccagactccgttttttaaaatactttccggcatcttttttaactgagtgatgttctggtaggagtagccctggtgacgcaggaactgctcgatacgcaggccgtccgcttcttctgttatctgatagttgatcgtacgatccatctttttctatcctgtcgtgtctgatggcataaaaacagacacaccctttctgatttgactctttatgaactcttgtatcatacacaaaatcttcaaaaattacaataatcttgaaatagtgttatgtttcttggaattttattatatcttattttggcactttttactataataacactatcaagaaaaacaaagacaagtagtaataaaaggaggattctattatgaagaagaaaaagattcttgcacttgtacttgcagcttcaatggcaggcggaatgcttgcaggatgtggaagcacatcaggcggagatgaaacagcaaaaggagataagtcatccggaaaagtttattatctgaacttcaaaccagagcaggctgatcagtgggtagaacttgctaaagagtacacagatgaaactggtgttaaggttgatgtacagacagctgcatcaggaacatacgagtcacagctgaaatcagagatggcaaaagacgaggccccaacattgttccaggtaaacggaccggttggacttgctacatggaaggattattgctatgacctttcaaaaagtgacgtttacaaagatgttgagtctgatgactatgtattaaaagatggtgatgcagtagacggaatcgcttatgttattgagacttatggtctgatctacaacaaagcacttctgaacaaatacttcgaactgccggatgcaagcatcaaatccatcgatgagctgaataacttccaggcacttaagacagctgcagaagagattcaggcacataaagatgatcttggagtagaaggagctttcacttcagcaggaatggattcttcttctgactggagattcaagactcaccttgcaaacctgccaatttactatgagtacaaggcagacggaattgatagtacagatgctatcaagggaacataccttgacaactacaaacagatctgggatctgtatctgaacaactctacatgtgagccatctatgatctcttctaagacaggagatgacgcagcaagcgaattctcacttggtgaagcagtattctatcagaatggtacatgggcttacaatgatatcaaagataacgaagtagcagaagaagatatgggaatgcttccaatctacatcggagttgatggagaagagaaccagggactttgtacaggatcagagaactactggtgtgtaaataaaaacgcttctgaagaagatattcaggcaacacttgatttcatgaaatgggtagttgagagtgacgaaggtcgtgacatgctggcaaatcagatgggattcgtaacaccgtttacaacattcgcagattaccttccggacaacccgcttgtaaaagcaaatgccgagtacacagaggctggaaagacaccagtaagctggaactttacaacaatgccatctgagaactggaagaacaatcttggtggtgctcttctgaactatgcacagggcacaggcacatgggatagtgtacagacagcattcgttgatggatgggctgaagaatacgcagcagcaaatgaataaaaaaggcttttcacaggaccgacagataaaaaggctgtgaaatagagaaatagtatgcagcctgccaacgagaataccgggggcaggctgaaagtgtgttattagaagtgtaaaaagagacagacctttttacagaaagagagacaggaggagaagaacatgcaaaaagctataaaaagatattttccggtatttgtattgccgacgctgattgcattcacgataggtttccttgcaccattcgtgttaggtgtatacctttcgttctgcaagtttacaacggtaacagatgccagatttattggacttggcaactatgcaaagatactgggagatggggatttccttcactctctctggtttactgcattatttacgatcgtaacagtattactgatcaacattttcgcttttgcggtagcaatgcttttgacaaagaagattaagggaactaatattttccgtaccgtattctttatgccaaatctgatcggtggtatcgtacttggatatgtatggcagctgttattaaacggtattctggcacatttccagaaaacacttacatattcttcaaaatatggtttctggggattagttatcctgatgctctggcagcagattggatacatgatgatcatctacatctcaggtattcagaatattcctggagagctgatcgaggcagcggagatcgacggagcaaataaagtacagcttttaagatatgttacaattccgatggttatgccatccatcacaatctgtactttcctgacacttacaaacggattcaaacttttcgaccagaaccttgcattgacaaacggtggaccggacaagatgtcagaaatgcttgccctgaacatttataatacattctatggaagaaccggttgggaaggtgtaggacaggcaaaagcagttatcttcttcattattgtaggagtgatcgcattaattcagaataaaatgacaacatcaaaggaggtgcagcagtaatgaataaaaaagtaaaacatggcacattattaactgttatttttacagtactcagtctgctgtatctgtatccgatcgtactggtatttatcaactcctttaagaaaaaagcctatatcagtaaagccccgttcgagataccgaccggaaagatgtatgtcggattagagaactatatccgtggtattaaacagacaggattgattcaggcatttggatggagtttgtttatcacaatcttatctgtagcagtgatcatcttatgctgctccatgtgtgcatggtatatctgtcgtgtgaagacaaagttcacaaaagtcttatatatgctttgtctgtttgcaatgatcgtaccattccagatggaaatgtttacattatctaagattgcaaatatgcttcatatgggaaatccatggggactgattgtgatctatcttggatttggtgcaggactttctgtctttatgtttaccggattcatgaaatccattccactggagattgaagaagctgcgatgatcgatggatgtacaccaatccagacattcttcaaagttgtacttccgattgcaaaaccgacttgtgtaacagttacaattcttcaggcaatgtggatctggaacgactatctgcttccatcacttgtactggatcagagaaaatataagacagtgccgatggcagtccagtatctgaaaggtggatatggttccgtagatatgggagcaatgatgggaactttggttcttgcaatcgtgccgatcatcatcttctatctgttctgccagagatatattatcgaaggggttgtagcaggagcagttaaaggctagttactgttcactcccgtgtcaatcactccgctgattgacacggaggatgcgtgttttgacttgaatgcatctcgccccatcgccaaaggcgatttaaaatggcgagatgcgttgctggtcgcacatcgtgtgaacagtaacaaaggctagtatagacaatggctgagagatgaattaaaatagaattataaaaacttaaaaaagacagcagagagtgagtgatcattccctgctgttttcggacgttataaaagaaatagtgaaaatataaagtgagcgtgtgggaggcgcgggggaatgattacaatactgatcgtagatgatgaaaaactggagagaaggggaatccgttttctgctgaaaagagaaggagacttccagattttagaagcggcgaatggaaaggatgcacttggtatactggcttcgaatcatgtagatattttattttcggatgtaaagatgccttacatgaacggactggaactgacaaaagcagtaagagaagatcatccggatatggaaatcgtgattttcagcggatataatgatttttcctacgcgagagaggctctgcgatatggtgtcgtggattatgtcctaaagccggtcgatccgaacgaatttcataagacctttcaacgagtgatggaaaatatctcatctaaggaagagaagcaaaagcagcagaacagaaaagaagattatctgaagaaatacttcttcctgagatatctatattcgggaaaagaagaggattttgttcaacttgagaaattaacggatgaaacagaagacgatgtttcacagttttcgcgcatggttcttgtcagtgcatccaatggtttttttgagacggaggaggaacattttctgacaagtctgaaggaagaggtgcagagagaattttattatgtgaatctgaattcaaatgagtccatctttctgttcccggagaagtatacagactatcatgtggttgtagagaaaatgtatcggttctttgcgcatcagtttgacagtgaatgttattttgcggtcagtaaagaaattgaggatagaaagaatctggcagaggagtttaaagccctggaaggaatgctggaagagcagttctaccagccacatcagcatttattttttcacggagaaaagcaggaagagaagaaagcagacccggcagaagattctgaaatcatggaacagatcacgaatgatattcaatataaagatctgccccatctccgtcaggattttcagaaattggaagataaataccgtgccaataagcagttttcagatatgtatgtaaagtttgtattttccggaattttaaaagaattgcttgatcagatggatgaaatggatgagaaaatgctttcgaagagagtggatcggttatatcgttgcaaaaacctgaaggatgtgatcactatagtagacgaagcacttcaggaatatgaacactgtatacaggaacaggaagacggattccgttcagagattacgaaagtaaaaagttacatttatcatcactaccaggagaggaatcttggagcagagacgctttcagcaatggtatttctttctcccggatatttgagtgctgtgttcaaagaagaaacgggagtgacactgaaccgctttatccgtgaagtgcggatggaaaaagcgaaagaacttcttgagacaacgaatatgaagatctccggaattgcaaaagaagtaggattttccaataactcatacttctgcagaagtttccgggaatttttcggagacacaccggaagcatgcaggaaaggaacagaggcggatgaaaaaacaaatacggaagctgctccatcgatttgaaaatctgaaattccgtaagaaactgtcagttttgatgttgattgcaggattggtgccggttgtattcctggctttttctatgcaatatggcatgacgaatcagctgagagaaaaggaacagtataacctggaaaaaatactggagcagtcggtgaactcaattgagaaccagtcacagatttatgaaaatctggtcgattatttatcctattcacaaagtctcaggaatattttcgatacagaaatggaatcagattatgagaaatatttgaaatatgtgaaagtagcagatccgttgcttcagatgccgaccatctatcacaaagagattcggagtattacgctgtattctgacaatatagaagtgccacatggagatacacttcttccaatgtcagaagcggagaatcaacagtggtattccagactgaatgaaggaacgctgatgcagtggagcattactcgtgggggaaataaatcaatcattgccagtcgaaaattctacgataatgatacgatcaaagcagtattggagatgcgtctggattatgaaaaagttcttagtccattcatgagtcagattacagataatacaggtggcatgattatggacgataatggaaatgttgtttatgcggattgttctatggataaaaaatatcgtccaaagaatattgagaatcttaaggatatcagtgataagtattatatttcacagagaacaatgaaagataccggatggaatttctatatctatcgtccgaaggcggtaagtgaaaatgcaatccataagcttttgcttaaaaatattccgttaattttaatcagtgttctccttttgagtcttttagggtatgttttctccatccgtatggtgtcacagttggaattattgacagagaatatgaaccagatcaatatgggacttcgcaaggttacggtgcagagtaagtccaaggatgaggttggtgtgttgattcggtcattccagcgcatgatggatcagatgaaccatttgatctcagaagtatatgagagtaagatccagcttcagaatagtgagatgagagcgctgcaggcacagatcaatccacatttcctttacaattcactttctattatcaactggaaagcaattgaagcgggggaggatgaaatcagttatgtgacattggcactgtctacttattatagaacaagcctgaatcgtggtgaaacaatgactacagtggcaaaagaaattgataatatccgtgcatacctcaagatccagttggttatgcatgataacgagttccgtgtggtcgaacagatttcagacggtcttaatgattatatgataccgaagctgatcctgcagccgctggcagaaaatgcaatcgatcacggaatcgatgtgtcagataatgaggatccaacattgtggctgacgattcgtgaagaaaatgagcatattttctttgaaatcagggacaacggagcaggaatgacgcaggaaaaggcagatcagatcctgacctatcagtcgtccggttatggcgtgcgaaatgtctgtgacagaatccatgttctttacggagagaaaggtgagatgaagatagaaagcactcctggaaaaggaacgcgtgtctttatccggattccgaagaagacggaggcaaaggtgctatgaaaaacgataggaaaaagcgaattctttcagcccagcttgtattaattttgttgatgatactttggtgcggaacttgttttgaatcaaaagaaagtcaaagacagatggaacagtcagatgcatctcaaagtgagtctggtgcaggcgaagcagctgaaggaaaaagaaaacagatgtatgaagcaatgcatacgccgcttggaaaatatcctgagacagtcacgtatacacttggcaagattgcaggagcaaataattcgaatctcccggtgggaaatacgtacgaaaacaatgcgtatacgagatatctgaagaaagtgcttaatattaaaaatgcagatgtctttgaattgcaggatggcaatacgtatgaagaggcagtcaatgtagcgattgaagatcgagatattccggatgtgcttgtcgtgaagggaagagataacctgctccgcctgattgaagcaggtatgattgaagacctcacagaaacttatgaagagtgtacgacagatacaatcaaagaaatgtatgacagttatggagattctctcttacaatctgcaacagttgatggaaagttgtatgcatttccgaatacggtgatcgatgacggagctccacttctctggttgaggaaagactggattgagaagttgggattgaaggaaccggaaacggtagaagaagcgttggagatagtgcgtgcatttgtagaacaagatgcagcaggagacggtcagacgattggtcttgcctgtagtacagatgtgattgccggggcggaccagacttatggagtggattcagcgtttatacatgcaggtgcaatgccatgtcactggattctggatgaaagtggagatgtagtttatgggtcagtaacgcaggaaacaaaagaagcactttcaaagcttcgtaatctatatgaggatgggatactcgaccagagattcttgttgagaaagacggaaaacatagataatctgttaaaaaccggacattgcggagcaatctacggacgttggtgggctccgaataatccgcttagtgcggcatatagtgtcgattcaaatgcagagtggaaaccgtatcttttagacaaagaacaagtgaatgagacacagaagatatcagtttttgaatcgtatgatcagtggatgtatgtggtggtacgcaaaggatatgagcatccggaaattgtagcaaagtatgtgagtgctatttttgatcagtccagatatgcaaatgatgcttcagcaagagaggtgaatgactatttttccattaatgtagatccgacggcccgcccgctgaatattaatgtggattatgaggatgcactttatcggacaacggaacatattcaggcagcgttggataaaacgcttgatgtgtcggaattgagtggactagaaaaatcttattatgatacatgtaaatcatttttgaatggacagttgacaacggcaaatggctgggcagcttatgcatcaagaattgaggcagtgggggaactgcagaaagcgggaatacgaagtgcacagacactgcctttggaaaacgtaaatgccgaaatcccgcaggaattacaggaactggagaatgaagcgtttcttcagattatcagtggggagaaaccagtggattactttgatacttttgtggtagaatggtatgcgaacggcggaaaagagctgaccgaacaggtacagaatgcctatgaaagtggaaaggactaaaaagaatggatattaatcagagactgacagaagaactggatgtaaaacgctggcagatcgatgcggcagtacagctgatcgatgaaggcaatacgattccatttatttcaagatatagaaaagaagcaaccggagaactgaatgacgaacagttgagaaagctgtatgaacgtctggtatatttaagaaatctggaagagaagaaagagcaggtaatctcaagtatcgaggagcagggaaaactgacagaagaattaaagaaacagattctggcagcggaaacacttgtggcagtagaagacctgtatcgtccgtatcgtccgaaacgacgtacccgtgcgacaatcgcgaaggaaaagggacttgagccattggctgcactgatcacattgcagaagacaaaagagccgcttgagaaggcagcggaagcgtatatttccgaagaaaaaggcgtggaaagtgcaaaggatgcaatcagcggagcatgtgatattattgcagaaagcatttcagatgaggcagcttacagaacttggatccgagagacgacaatgagaaaaggaaaggttacttcccaggcgaaggatccggaggcagagtctgtttacgagatgtattatgagtttgaagaagccgttgcgaagcttgcaggacatcgaattcttgcattgaaccgtggtgagaaagagaaattcctgacagtgaaggtggaagcaccggaagaagatattttaagatatcttgagagaaaagtgatccgtacagagaatccttatacaacaccggtattgaaagagacaattgcagacagttacaaccgtctgatcggaccggctattgagcgtgaggtcagaaacgaactgacagagaaggcagaagacggggcaatcgaagtgtttggaaagaaccttcatcagctcctgatgcagccgccgattgcaggcaaggttgtgcttggctgggatccggctttccgtacgggatgtaagctggcagttgttgatgagacaggaaaggtaatcggaacaaccgttatttatccgactgcaccgacaacagagaagaagatccaggcaagtaaagatctgcttaagaagattattccgaagtatcacgtttctctgatctctcttggaaatggtactgcttcccgtgaatcagaacagtttgtcgtagagcttctgaaagagattccggagaaggtacagtatgtgatcgttaatgaggcgggagcatctgtctattctgcaagtaagctggcaacagaagaattcccgaaatttgatgtaggacagagaagcgcggcatcaatcgcacgccgtctgcaggatccgcttgcagagcttgtaaagattgatccgaaatcaattggtgtcggccagtatcagcatgatatgaaccagaagaagcttggggagtctttaaacggagttgtagaggattgcgtaaataaagttggagtagatttaaatactgcttctgcaccgttactttcttacatctcaggaatcagcagtgcaatcgcaaaaaatattgtggcgtacagagaagaaaacggtcgatttacagatagaaaagaactgcttaaagtaccgaaactcggaccgaaagcgttcgagcagtgcgcaggttttatgcgtatttccgaaggtaagaatccacttgatgctacaggcgttcatccggaatcttatgctgcagcagaaaagctgttgaagaagcaagggtacgaagcagatgctatcacagcacatcagctgacaggacttggtcttacaatcggagattataagaagcttgcagaagaacttggaatcggtgagattacgcttcgtgatattgtcaaggagcttgagaaaccggcgcgtgatccgcgtgatgagatgccaaagccaatccttcgcacagatgtccttgagatgaaagatctgaaggaaggtatggtgctgaaaggtactgtgagaaatgtaattgacttcggagtatttgtggatattggagttcaccaggacggacttgtacacatttcccagattacagacagatatatcaaacatccgctggaagcagtaagtgttggagatgttgtggatgtgaaggtgatgagcgtggatctgaagaagaagaggattcagctgacgatgagagggatttaaggttaagtaagtattttggtttgattaagatgcgtgaggaagtttctttattgcatcggacaccggcccgctctacctcatccctttgacaatctgtaacggaaaagccagaacactcgccgtgtagggttcctgtctgacttttcctagcagattctgcaaagtgtattcggaacgctcctgccttatatgtgtcctcaacaacaaagaaacttcctcacttacattattcaaaccgaaagtatttgcttcgagtggacggattcgaggaaaatattgaagtcgaggacaaaagtaaaaaacacccagaacagagaccaatagagtatctgtttgggcgtttttttaattcaattatctgatcttctgtgttgctccgtaaagttttggtcctacgattgcagcgatgataatttttgctgcatctcctgcaaggtatgggataacgcccatcataagtccttctttgaaggagaggcttaacagtttggcaagccatacagttccgaatgcataacatacagccattccgatgatcattccgatgattgtaggaacgagcttacggtcaaagtgatcgagtgcaaatcccatgatcagtgcgaggaagatgaatccgatcagatatccaccggttggtcctgcgagaacctggagacctccacggaaagaggagaagaccgggacaccaattgctccaagcaggaggtagatgataaagctgattgttccggatttcattccgagaacgaagattgcaaggaagattgcaaagtttgtaagggaaatcggaacagggctgaatggcagcgggatggaaagtggtccgaggacgcaggttactgcagtcatcagggcgatgagtaccatctgttttgttcttattttctggttgtctacggcaactgtgccggaagtttcattctgtgacatttcaatttactcctttagatcttaatacttatcgctgtttcaagcgagctttaacatcgttgtctgaaatatggcaacgattgagttcttcgttagtataattcatgaaaagttaattgtcaactataaaaatataaaaggttaacaattaaaaacttattaattttattaattttgcagacatgtgataggcaaaatggaaagaataaggtagaatagataaagtcaggaaaattgccagaagagaaaggaattgcatgtttggatatgtaacggtctgtgaaccggaattaaaagtaaaagatctgaagaaatacagggcatattattgtggactttgccggacattgaaagaagattatggatttatggggcagatgacattgacgtatgacatgacatttgcagtcattctgttatcttctttatatgagacaattgcgaaacatgaggaacaccgctgtaaggttcatccagtgaagcggcaacatatgttgcggaatgaaattacatcttatgcggcggcgatgaatgtgctgcttgcatattatcatatggaagatgactggcaggatgatcataaagtgtcaagtctgatgacgaagagcctgattcagggaaaagcaaagaaaattatagagaaatatccgcggcagagcaaggtgattcagcagtctttgagggaacttggagaatgtgagcgtgagaatagtatggatattgaccgggcagcaggatgttttggcagattaatggcggagctttttgtctggaaggaggatatctgggagaagacgctcagaaagatgggattctatctcggaaaattcatttatctgatggatgcctatgaggatctgccggaagatagaaagaagaatcgctacaatccattgaaagaactggcaaagcggccggattatgaggtgcagatggaacagattcttcggatgatgatagcggagagcacagtccgttttgaacaactgccatgtctggttgacgtggacattttgagaaatatactgtatgatggagtctggaatcattataataagattcagatgaagaaaagtgaggaaaagaatgatgacaaaaaatccatatgatgtgctcggtgtgtcaccgaatgcgtcggatgatgagataaagagagcataccgggatctgacaagaaaatatcacccggatgcaaatgtgaataatccgttagcagatcttgcagaagagaagtttaaggaagtacaggaagcgtatgatattatcatgagagagcgtgcgaatggaggaaattcgtacgggaataattatggatatggttcttctgaaagttattcttatggaaatcagtcttatggaaatcagaacagctcttatggctatggaacgatggatcccaaactgcaggcagctgcgaactatattaacagcagacgttatagagaagcaatcaatacattggatcaggttcagcagagaagtgcgatgtggtattatctgagtggctgtgcgaatgcaggaatcggaaatcagattctggcgagggatcacgcggcacaggcagtaaatatggaaccaaataacatgcagttccgtcagctgttgaatcagttggatttcaatagcagaagatatcagaacagtccgtatggtggaggctatgcaccgggaggacagaattcctgtggtacaggaaatatgtgttgcgacttatggcttgcggacacattgtgtgaatgtatgggaggcgatctctgctcatgcatgtaaaagcaaaacaaatggcatttggaggtttgatccttgcggtgactgtcgtgtgtatggcacttggaagcgtgatcgagacgaatacattgtttttgttggcagcagcggcattttttgtagggattgttattcgtgagttcggccttcgtacaggggcagccttttatctggcagcaattttattaggattcctggttacgccgaacaaattttatgtaataacatttgctgcgatgggattctatattcttggaattgaagcggtctgggtatttcttgcgaaaagaccacagatgggacataggatggggatttactggcttgtgaaatatgtgatctttaatctagtgtatcttccgtgtcttttcggattccgttcgatgctgtttcagaaagcagtgtcagatcagttgcttttggcagctgtattggttgggcagatagcaatattggtttatgataaagcttatcagtatgttcagggaaccctatgggaaaaatggagaaaacgtattctataaagaatgtatgagaaaatcttgtcgagaagacaggatttttctttatataaaaggaatgagccacatctctgtgactcaagggggaaaaagtttatgaaaaagtgttctttttaagaacacttatagtatagaggtattttgtgaaaaaagtgtgatgaacttttgaaccgaaaatgaacattattgaaaaaatttattaagaacacgacaaacctagtaggaaaaaaggaatatcaatatattagtcgaaagtgctacaagtgatatcgattatggtgcaaaatgatattaaatatcaataaaaggggttgcatttttagtaagagcgcgctatagtagtaagagtaaaaggaatttaatcttcggggtagggtgcaagtcccaaccggcggtatagtccgcgacccgcatatgatgcggctgaactggtgactcgtctgtgatggcattacagaatgggaattccggtaccgacagtaaagtctggatgagagaagaagttcatgcccgcaggatcagaaaaagagatattcgaatatgatatctggttgcctgagaatcttgcgagaatgccattaagagcagaaaacatgaatcccggaaggtaattaccttccgggttttttcttgtgaagattacctttttcaaaaagaaaaaatgctgtttaggataaagacagcggatagaaaaaggagagtaacactatgagtacagagacaaagacactaacaaacgcagatgcgaagattcagccgaagctgggggtaaaggcattagttcagatcggaatgctttcagcaatcgcaattattctgatgatgttcgagattccacttccgtttgcaccgacattttataagattgatttaagtgaagttccggttctggtaggatgctttgcaatgggacctatggcaggtgttctggtagagcttgttaagatcttattaaactttgttatgacaggaacatcaacagcaggtgttggagaaattgcaaactttattatcggatgttctttctgtgtaccggcaggtctgatctatagaaaaaacagaacaagaaaaagcgctctgatcggaatggcaacaggaacgcttctgatgatcgtgatcggatgcttcgtgaatggattcgtacttcttccgacttatgcaaaagcattcggaatgccgattgatgcactggttggtatgggaacagcagttaactcacatatcacaagcctttctacatttgttatgtttgcggtagcaccgttcaaccttgtgaagggaattgttgtatcacttgttgtatttctgatctacaagaagatcagcccgatcttcagaatcagataatagacgaagagaaaagtttgagataaaagaatataagtgaaagaatataagttgctctgggacagattgattttaaagtctgtcccggggcattttttgttggcggcatatccgaaagctgcaaaaagtcgaataggcagtttatttccgtatcttcatcgcactaagtgcagcaccgatcgcaccggcgtagcgggcatccgggcaggaaatcacttcttttccaagttcttttgataaagcttcgcggatatattcacattcacacagaccgccggtcagacagaatgtggacatatcaccattcatccggctgacttgggcggcaaccttgcggatggtggaatttactactgcataagcaatattttctttcggttctcccttaccgatcagtccgataacctcggattctgcgaatacagtacacatggagctgatcgttgtgtcagaacccaggcgtgccagatcaaacatttcattcgggcgaagagagagtgtgttggccatcacttcaagaaaacgtccggttccggcggcacatttatcattcataataaaatcttttacgaatccctgttcaatctggataatcttcgtatcctggccaccgatgtcgatcacggtcaggtccggttgttgaaacagatgcacagcaccaagagcatggcaggtgatctctgtgacggtcttatctgcgtaaggaacagagatgcgtccgtaaccggttgctacacagcaggaagagtcatcagaaagattgattccggcaagctcaagtttttgatggatttcctcggctgtatctacgctgctccatccggttggctgaacgaattcctggataatttcttttttttgttcaaaacaacggttttcgcacaggttgaaccgatgtcgattccaatgtagttcataataaaaactcctttataaaaacagtcggctctcgcaagagaacagccgactgttcagagccaacctccaaaatgctacgcatttcgtcggtgtggcgtatccgccaaataaaatttcaaaaacattcttaaaaatgcaagcattttatagctgttttttgaaattttgcttgactctgaacagttaccagattataacatttcgataaaggctgctatacgtgtattcagctgtccaacatcagtctgggaataatctgtctcaacattcatgtatggaattcctttttcctcgtttacaaagcggcggatggaaagagtctctacgttataagtgtggcatgcctgaagagtcatttcaaggactccgtctactttatactcatcaatcaatcttccgagaagttccagacggttcgggtttggagtcataacagaacatccgattgagaggtaacgctctgcgattgcctggtaaatgtcttcagcatcttcgtcaatcagacgatcgatggattttgcaccggagcagttttcaaatgtaacaacgattccaccgttattctcaacagcgtcgataatcttctctgttgcaccgccaatcggacatccggtgatcagaattcttggtttcttatcttcacgttttccttcggcatattctttctcaatcttggctgtcagtgcgtcaacttcatcagcaatcagagtgcggtcaagcttaaaaccacttccgtacagaacacggaaaagatcatgtcctttgattggtgctggatcatgtctcataactccgtaaagattcttcaaggatgtgcggacttcattttcaagcttaactgctttacgaacctgttcctccgtgatcgttatctcgaattttttttcgagatattctttgaagcggagaatctcagccttccaaaggtcgagtacttcagctttctgggattgtggcagttccatgatgaagacctctttgaattcgcccatgtattcgtacattttcttcttaccgtcacatgttgtctctccgacaacaacgtctgagaagtagaagaaagggcatttgtctgtctttgcaaatccataacttgatttgatcagtgggcataagttacgtggaagatctttttctgctgctggaatcgtctcatcagatgtagagcagaggctgactgttgctgcgcccattgccatggcaatctcctttggaaaataagtacagtaggatccaatcacagggattcctttgtctttcaactgttttacagcgagaaatgatttctgacgctgttctgcgaattcttcgaatacttccggtaaatctttaataatttccataatcgttctccttattgttgggtttgtggatggctgttgtagagagattattttattaaacgtatgctttccaaaaaacaaacgatgggaataatccactcataaccaaagcttttatagataaattttatcgttttttaatgaagttttccaatagataatatatatatgaagaaagaacttatagataaaacctataaggtggagattagaaaattggaactggatgaactgtaaaattctgttctttgttctgcccaaaaagtatgataaaatgaaaagaagtagaaacaatctgtttcatcagtcaggtagaagtgatagatcagcgaaaggaaatagagcatatgaaaacaatagggattggaattcaggattttgcaaaaatagctgataaaaatatgttttatatagataagacagcttttctaaaggaatggtgggagaatcaggatagtgttacattaatcacccgcccaagaagattcggaaaaacattgcttatgagcatgacggactattttttctcagtcaatcattcagattgcaagaagtattttgaaggcctagacatctggaaagaagaaaaattccgtgaacttcagggaacctatccggtgattttcatgagttttgcagatattaaaggatcaacttatgaaaaaaccagaatgggggttatccataagattacaaagttatatacagactttgaatttttaaagaggacgggagttctcagtggcagagacctggagttttacgattcggtctcagtggatatgggggatgatgttgcaggaattgcgatacagtatatgtgtgattatttgagacgttattatggtaagaatgcgttagtgttactggatgagtatgatacaccgctacaagaggcatatgtaaacgactattggaaagaactggctgattttataagaagcttatttaatagcacatttaagacaaatccgtatctggaacggggacttctgaccggaattacaagagttagtaaggagtcaatcttttctgatttgaacaatttggaagttgtaacaacaacatcagaaaagtacagcacttcctttggatttacagagaaagaagtctttcaggtattagagaataaccgattgtcttctgaaaaggaaaatatccgttactggtatgatggtttttcttttggtaagcggaaagacatttataatccgtggtcgatcacaaaatatctggatacaggagaatatggaacttactgggcagataccagtggaaatgtacttgtatccaatttgatccgccaaagtcctgcaaagattaaatcagaaatggaagatctgttgcaaggtagaacaatctgcacagatctggatgaacaggtgatttttgagcagcttggaagaaaacgtggagccatctggagtcttctgcttgccagcggttacctgaaagttgaccggtatgagatggataacagaaccggtaagcgtcaatattatctgaaaatcacaaaccatgagacgatgctgatgtttgagaagatgatcgaagactggttctcggaagaagattctgcgtatggaaattttaaagatgcattgattgcaggagatctggattatatgaaccagtttatgaatcaggttgcacttcagacctttagcagttttgataccgggaataagccatccaaagaacaggaaccggagagattctaccacggatttgttcttggactgatcgtggatttagccgaaaaatatagaattacatcgaacagagaaagcggattcggacgttatgatgtagtaatggaacctttgaaagaaaatttggatgcaatcgtgatggagtttaaagtccagaacatgaaaaaagaaaaatcactcgagcagacagtagagaatgcactgcgtcagattgatgaaaaagaatatgatacagaactacttgccagaggaatcaaaaaggagcgaatccgacattatggatttgcatttcgtggaaaaaaggttttgataggaacagaagaataaaggtaaaataaagggatgaagactttagtggattcatccttttgttatagtaacaaaaagattttaaaaagttttctttccacttgcttgccttgtatttaccagtgaaatcggatatactaaagaatagtcaatctttgaaaaatttgatatttataagaacaaaaaccaaggagaaaaagaatgagtatatatgatttgaatgcatatgaagtgctccagacagaagatttatctgatctgaagtcaaaggggacacttctgaagcataagaaaagcggagcgagagtgctccttatggaaaatgatgatgagaacaaggtgtttacaattggattccgtacaccaccgtcagacagtacaggagttccacacattatggaacattctgttctgtgcggatcgaaagaatttccggtgaaggatccgtttgttgagcttgtgaaaggttctctgaatacatttttgaatgcgatgacttatccggacaagacagtatatccggtggcaagctgcaatgacaaggatttccagaacctgatgcatgtttatatggatgcagtattttatccaaatatttatcagaatgacaagacattccgccaggaaggttggagctataagctggataatccagatggagagttgacaatcagcggtgttgtatacaacgagatgaaaggagcattctcttctccggaaggtgtacttgaccgcgtggttctgaactctctgttcccggataatacgtattccgtagagtccggtggagacccggaggtaattccggaacttacttatgagcgatttttagatttccatagaaagtattatcatccatctaacagctatatttatctgtatggtgatatgaatatggaagagaaattaagatggcttgatgagaagtatttgtcagattttgagaatgaaccggtggattcagagattcatctgcagaagccatttacagagatgaaggaagtcgttcaggagtattccatcgcaagtgaagagagtgaggaggataacacctatctttcttataataaagtgattggtactacactggatgagaaactgtatctggcatttgagattctggattacgcacttctgtccgcaccgggcgcaccgctgaagaaagcacttctcgatgcaggggtcggcaaggatatctcaggatcttatgacaacggagtttatcagccgatcttctctgtgatttctaagaatgcgaatgtagagcagaaggaagaattcgttcgtgtaattgaagatacattgaaagatattgtgaaaaatggaatcaataagaaagcacttcgtgccggaatcaactatcatgaattccgtttccgcgaggctgatttcggaaattatccgcgtggattgatgtatggccttcagttgtttgacagctggctgtatgatgagacgaaaccatttatccacatgcaggcgattccgacatttgaattcttgaaagaacaggtggagacaggatactttgaagaactgatccagaaatatctcctggataatacacatggttctatcgtgatcattaagccggagcgtggacgtactgcaagaatggataaggaacttgcagataagcttcaagcatacaaagacagtttgtcaaaagaagaaatcgatgcacttgtgaaagcaacgaaagagttggaagaatatcaggaagaagagtcggcaccggaagatctggcgaagattcctgtactcggacgcgaagatatttccagagagatcgcaccgatttataataaagagcttgagacaagcggagtgaagctggtacaccatgaagttgagacgaatggaattggatacacagcgcttttgtttgacctgtccggtattccggaggagaaacttccatatatcagcattctgcagagtgtgcttggaattattaatacaaagaattatgaatacagtgaactatttaatgagatcaatgtacacacaggaggaatcggaacttctctggagctttacacagacgtaacaaaggtaaaggagaaagaattccgtgcaacatttgaaatcaaaggtaaagcactgtatccgaagatggatgttctgttttctatgatgcgtgagattctgatggaatctgatcttggggatgagaagcgtctgaaagaaatcttagcaatgttgaaatccagactgcagatgtccttcctgtcatccggacatacgacagcagcccttcgttccctgtcttatacttcaccgatggcgaagttcaaggatgatacagatggaatcggttattatgaggttgtaaaggaactggaggaaaactttgaggagaagaaagcagaactgattgcaaacttaagacagattgcacagcagattttccgcaaggataatctgatcatcagttatacttcatcagcggatggtcttgcaccgatggaagaagcatttgcaaagattgcagacacacttcatacagaagagaaagaagcagcaacaccgtgtgaaattcattgtgtgaaacgcaacgagggattcaagacatcttcaaaagttcagtatgttgcaagaacaggtaactttatcgaccgtggtgttgagtatacaggagcacttcagattttgaaagtcatcttgagctatgattatctgtggcagaatgtccgtgtgaagggcggagcttacggatgcatgagcagcttcaatcgtattggagagggatatctggtatcttaccgtgacccgaatctggagaagacaatggaaatctacgaaggagttgtggattatctgaaaaacttcaatgtagatgacagggatatgaataagttcatcattggaacaatcagtaatattgaccgtccgatgaatccggctgcaaagggaagcagatcaatgaatctttatatgaaccatgtatctgctgagatgatcagggaagagagagatcagatccttgatgcacagcagtcagatatccgtgcacttgccgatgtacttcaagcattacttgatgcacatgaactttgcgtgatcggaagtgaagagaagattgaggagcagaaagagatgttccttgaaataaagacactttaagatggaaaaagaaaggaaaaagtatgcaggataattttaaatcaggatttgtcacactgatcggaagaccaaatgttggaaaatctactttgatgaatcgtctgatcggacagaagattgcaatcacatcaaataaaccacagacaacaagaaaccgtatccagactgttctgacaacagaggaaggtcagattgtgttcgtagatacaccgggaattcacaaagcaaagaataaacttggtgagtatatggtgaatattgcagaacgttctttgaatgaagtggatgttgtactttggcttgtagagccatctacatttatcggtgcaggtgagaagcatattattgagcagttaaagaaggtaaagacaccggttattcttgttatcaataaagttgatatggtgaagaaggaagaggttcttacttttattgatgcatatcgcaaggaatgtgattttgcagaaatcgttccggtatctgcaagaagaggcgataatacggatgagcttgtgaatgtaattatgaaatatcttccatacggaccgcagttctatgatgaagatacaatcacagaccagccggagcgccagatcgtggcagagattatccgcgagaaagcattgcacagcttgaatgaggagatccctcatggaatcgcagtagcaatcgatcagatgaagatgaaccacaaagtgtgtcatattgatgctacaatcatctgcgagagagattcccataaagggatcatcatcggaaagcagggaagtatgctgaaaaaaatcggaagtactgcaagatttgagatcgagcgtttgctggattgcaaagtaaatttgaagctgtgggtaaaggttcagaagaactggagagacagcgattatatgatgaaaaattttggatacagggaagacgagatgtaagccctgaaatgcatttgcggtaaattctgaagaaattctaaagaaaaaagtgctgttccttaaagaatggcacttttttctttaataaatgccaaagcctattgttattatgaaaaagtgggataaaatgatgtaagtacatagcaatggagcaatctggttacatcataaaattggaaaagaatggagaaaacaagaagtgagacaaaggacaggggatttggacagaaagagaataatagaaatcttactcccgccggtaattgtttttctggtgaattcagctgtctactggggagcaccgagattgacagataccggtgagtaccataacctgtcacttgcattagatgcaaagatcccattgatcccggcatttattcttgtttattttggatgttacattttctgggtgattaattatctgcttgtatcattgcgggaggaagagataaaatacagattctttacggctgatttgtatgcaagaatcatttgttttctgttttttgtgttttatccgacaacaaatgtaagaccagaacttgtaggaaacggaatttttgttcagggcatgcgctttttatatcagattgatgaaccggtgaatttatttccatcaatccattgtatggcaagctggttctgttgtattggaatcaggggagataaaaaagtaccggtgtggtataagatcgtatctgtaatgattgcagtgttggtctttatttctacgcttgtaacaaaacagcatgtaattgtggatgtgatcggtggagttgcggtagcggagctgacctggtttgtgagctgccggacaaacggatggaaaatttacagaaatctggttcgtaaagcaggaggagaaaatggaaaataaaaagaaaatgatatttaatgtactttttctctttcttgtctttgcggcaacaatctatggagtattccatggggaggatttaagtgagattgcagaaattctgaaaacagtgaaattatactggttgcttccaggtgttgcctgtgtgattatctttatctggggagagtcaattattatattttatatgatgcatacgcttggtattcatctaaagaaatggaaatgtttcttgttttcctctgtaggattctttttcagctgtatcacgccatccgcaacaggaggacagccggcgcagatttattatatgaagaaagagaaaattccaatcccggtatcaacgcttgtattgatgattgtcacgattacctataaaatggttctcgttgtgatcggtcttggacttatgatcttcggcaggggattcatcagaacacatatgtatgatatccgccatattttttatcttggaacaggactaaatgtattttgtgtgtcttctatgctgctccttgtatttcatccggtgcttgcgcgttctattcttgtaaaagggatggaactgctggaaaaaatgcatctgatgcgatataaaagtacaagaattgagaaactgaatgcatcgatggatcagtatcatgcaacagcggtttatctgaaagatcatataatggtactggtcaatgtatttgcaattacattatttcagaggttcgcactgtttacagcaacctggtttgtatataaggcatttggactgtccggaacgaatgcattcgtgatcattcttctgcagtctgtgatttcggtttctgtggatatgctgccactgccaggtggtatgggaatcagtgaaaaactgttttcgatgatttttgagccggtttttggaagtgcacttttgattccgggaatgatcttaagcagaggacttggatattatacagaattattgatcagtgcagtttttacgatcgtggcgaattttacaataggaagaaatttaaggaagaaagcataaataaaaggagagttattctgataagaataaaagcaagggggaaataaaatgttaggtgtttatgattacacagttatacttacatatatcagtctgtggatttcgattggtgggatgatgctgtcattgaatggacatctggatcttgcagtattgtgtcttgcactgtctggtctgtgtgatatgtttgatgggaagattgcaagaacaaagaaggatagaacagaaatagagaaacgttttggaatccagattgattcactgtgtgatattgtctgttttggagttggaccggcgatcatctgttattgtatgggaatgaatgggattgtcggtgttcttattcttatgttttatgtattggcaggattgatccgtctggcatggtttaatgtaacagaagagtgcaggcaggatgagacaacagagaacagaaagtgttatcagggattgccgatcacatccatgtcgatcgcattaccgattcttgttgtgcttcgcccatttttgcactgtgatttcagaatcgcactgcatgcgatggttcttcttgtaggacttctgtttgttatggatttcaaattaaaaaagccggggaataagacactttctgcattagtcggagtagtagcggttgcagtagtctggacattgagacgaagattcatgtaagaggagagattatgatttatgcagacagaaacggaaacaggacggagaaaacaacagggcaggacagattcctggaatatatctatggacatacattgacaagaatgatgctgaaaccattgcttggttccaggatatcccgacttggcggaaaagtgctggacagcagagtgtccaggctgttgattccatcgtttgtcagaaagaatcagattgatctgtcaatctatgaaaagaaacattattcttcttataatgacttttttacgcgtaagattttagcggaggaacgtccgatcgacggaagaaaagaagtactgatcagtccttgtgacgggaaagtgacagtttgtccgattcaaagggatggactttttcttatcaaacagacacagtatacagtccgcagtcttctgaaggatgaaaagcttgcgaaacgctatgaaggtggaacagcttatataatccgtctcacggtagatgactaccacagatattgttatgtggcagatggtgtgaaatctgcacagcgaaagatcagaggagtattccatacagtaaatccggtggcaaatgactatgctccgatttacaagatgaatacaagggaatattgtcttgtacagacagaagaactgggaaccgttttgcagatggaagtcggtgctcttatggttggacggattaagaatcataaaaagaaagtatctgttgtacaccggggagaagaaaaaggaatgttcgagtttggcgggtctacagtcgttcttttgacagagccgggaaaagtgcagacggatgaagatctggtgagaaacagtgcaaccggtgcagagacattggtaaagatgggggagaaaatcggaagcaaaaaataaaagactgggaagttgttgtgaacaggtgaaatatacaataacttcccaatcttctttttttgtgatattctagtattgaacatttacttaaggtaagaaatatcgttaaggggtaagaaaatgaaatacgagaagatgaacaatctcttcctgcgtcagtcctatctggattcctgggaagattatgaaagaagtttaaagaaaaaaagtttcattaaatgggactatattatattaacagcatcaaatgaagcacaggcaatggcttatcggaatcagattgagaaccgtttggaaaaaggtcttcttccggaggagacaacgtatgcggttcttccggatccggagggaaaacgtgtgggatcaggaggcgctacatttcaggtgatgcgttatattgcagaccaggaaccggagagagagaatccttttaagaatcgtagaattcttgtgattcattcaggtggtgacagtaagagagtgccgcagtattctgcaatcggcaagcttttctcaccggttccaagagaattgccggatggaagaagttccactttatttgatgagtttattgtaggaatgtcaggagttccatccagaatccaggagggaatgcttgttttgtcaggtgatgtattgcttctgtttaatccacttcagattgatgcgcagtttgacggagcagcagcaatttccattaaagagccggtagctacaggaaagaatcatggcgtatttctgaacgacggacatgattatgtaaagtgttttcttcataaacagacagaagagcgtctgcgagagatgggagctgttaataatgcaggaaatgtagatcttgatacaggtgcggtattgtttggcagcgcactgttgcaggcactgttccgtctgatttcaacagagggcaaagtagacgagaagaaattcaggcagttttgtaatgaagaagcaaggatcagcttttatggggattttttatatccgcttgcaaatgattctacattagaagatttctataaagaggcagcagaaggacagatcaatgaggcactgcatgaatgcaggacacagatctggaatgcgatccatcatttttcaatgaagctgctgtgtctgtcaccggcggaatttattcatttcgggacaacaagggaattgagaagtcttgtaacaaaagatgtgcaggattacgagttcctggattggaagatgcaggtgaattcagcggtgcaaaaagaaggatttgcagcgcataatgcttatgtaggaagccgtgcgaagataggaaaagaagcatatctggagaattgttatattcttggtaattctgaggtcggcgacggaaccgttctttcccatgtgcgcattatggaccggaagattccggaacagattgttatgcacggaattgaactgacaggtgggaaaaaagtaatcaggatttatggtgtaccagataatccgaaaggaaaatatccgggagaggtttcatttctcggtacgacattgaatcagtttatggctcagaataaagtgacgaaagaagaactctggaaaggagaagagacctatctgtggtttgcagatctttatccggtgtgtgatgactgggaagatgcacttgatatggctgaaatcatttacaagatggcacatggtactgcaacaaaagaagagatttccagatggcgtgagactgaacgcatgagcctctattccagttttaatgcagcagatattgaggcatcctgtgatcaggagaggtttcttgaaaaccgtattcttgcaaggtgtttcatcagaaaactggagcagggaatgtattatgcggaggcactcaagatatttggaaagcgtggaatatcgaaagaaatctttaagttgctgatggaagatgcagcagaagcagatttctcattgaagattcgaatctatcatgcagtctcctgttatatgaaaaagacaagaacgatttatgatgatctgcattatgatgcacttgagaatgactgttttggaacaatccaggaggcaatttatgaagaagcagagaagaaacttccggatagtgcaggatatagaattgtaaaagatcaggttgatatcgcccttccggttcgcgtgaactggggcggaggctggacggatacaccaccacattgtaatgaaaagggtggagtagttcttaatgctgcaatgaaattaagaggaatctatccggtacagatcacggtgaagagattagatgagcttcatgtggaatttgaaagtaaggatatcggagtctatacaactgtagacagtgcagctgagatccaggattgtcataatccatatgattcatttgcactgcataaagcagctttgatcgcctgtggaattatcccggtcaaggaagaagcagatcttcaggagattttaaagcggatgggaggaggaatctatctttctacccaggtttatggagtaccgaaaggatcagggcttggaacaagcagtatcttatcaggagcgtgcgtaaagggaatctttgaatttcttggtcaggagcgtacagatgcagagatctatgatgttgtccttggtatggagcagatcatgagtaccggaggcggatggcaggatcaggttggcggactgacagaaggaattaaactgatctcaacaaaaccggggattgcccagaatcttgttgtagagaagatagaaatgccggaagagggaaagaaagaactgaaagagcgtttcgcattgatttatactggccagaggcgtctcgcaagaaatctgctgcgtgatgtggttggtagctatatcggaagcagaccagaatcattgaaggcattaaaggagatgaaggcaatcgccgtgttaatgcgttttgcactggagcagggagatattgacgaatttgctgagcttttaaaccaacattggaaattatcctgtatgttggatgccggtacaaccaatacctgtatcgatcagatccttcttgtatgtgaagacctgatcgatgggaagtttatatcaggagccggtggaggcggattcattcaggtgattctaaagaaagatgtgacaaaggagcagctgcatgaacgtctgcatggcgtgttccaggacagtggcgtagatgtatgggattgcgaattacttgtttaacgtataagtaagacaagaaatgaaaatttgacaaagaatttctacatggtataatgggcgaaaaagaaagcagtatatcagttaggagtagatttttgaagagcaataagaaaacgaatagagagaagaacaggaaattgacgatgatctcatttttgccggcaatcatttggctgatccttcttttagttttgtcaagccagaatggaccacagacagcagcaaccagtctgccgatggcagaatggatccaacagcacttttttccacaggacagtgtggattatgtgcatatgtatctgagaaaatgggcacactttatcgtttatttcatggaatcaggattattggttctggcaatgaagaatgcgatgaaagcctggaaagcggcgtgtgcggtattcggactttgtacgatcctggcaattgcagatgaggcacacaaggttctgatcgtaggaagacactgtcagtgggatgaagcaggaatcaatattgtcggtgtgatcatgggagtgctgctgacctggagtattctatggctgattcgttgggcaaggggaacacttgaagattagaaggaatattttcgcagaaagcttcatataatgacatcaggaagacaagctgtgaaaggggaaatcgaaaggtggttcttggatatattgtctgttttctcggtggtctaattctgggcgtagtccttatgtgtttgcttcagataaagagatgatttgtgagagaggttgagaggcctctcttttttgtatatcaggaaagtattttcctgatatacaaaaaatactccgtttaggatctgcacaaatccgaaaaacacctgttgttgttttacataaacttaacatttggttgatttcagactttacatttcttacgtaacatatgtactgtgcttgagggaagcataaatggctgcagaaaataaaaaaagaaaatgcagtgggattagaaatgtgtatgaaatgtaaaggagataattgacatgaaaatgaaaaagtttattgcattacttacagtagcaggtatgacagcaacaatggcagttggatgtggaagttcatcaaatgaaacttcagataatgcagcagatacaaatacagagagcagtgacagctcattaagcggaacaatcacagcagccggttcatcagcactgaaaccacttgctgatgatgcagcagattcgtttctaaaggatcatccggatgtatctatcacaatcgatgcaggcggttcaggagaaggactgaagcaggtatcagaaggaactgtagatatcggtaactctgatgtagcagcagaagataaactggatgagacagcagcaaaagagcttgtagatcatcaggtatgtgttgtaactatggcaccgatcgtaaacaaagatgttgcagaagcaggtgttaagagtcttacaaaagagcagttgatctccatcttcacaggaaagacaacaaactggaaagatgttggaggaccggatgaggatatcgttcttgtaacacgtcctgagtcttcaggaacaagagcaacattccagaaatatgcactggacggaaacgaagaagcttctaacacatccatggaaacagatgattccggagttcttcttacaaatgtaaagagtacaaacggagcaatcggttatgtagcactttcttatctgacaggagatgcaggtgttgagacagtagcaattgatgatgttgagccaacacttgagaatacttacagcggaaaatatcctgtatggacattcgagcatatgtacacaaagggtgaaccaaatgaagtgacaaaagcattccttgattatatcacaggtgatgaatatggcgctcagatggagaaacttggttatggtgttgcatctaagatgactgtaacagagcactaatagcataaagtgaaaagctatgaaatgtactgtgtgttccgggaaaaatcagaacagcagtacatttcactgataaaaggtgaaaatatgaagaaacaaaacatgtttacaaaagagtatgcatggagaggactgatgacagcgggcggtttgcttgttattgccatcacaatctgtatcggagcctttcttatatataagggatccggtacatttacgatatttggtcattccatatttgaattcttaggatcgacagactggaacccggaagataatgcacaggggggtggaactgtcggagcattgatctttatcgtgggttctctatgtacatgtggtctggcacttctgatcgcgactccatttgcagtaggttctgcaatctttatgattgagatcgcgccgaaattcggagaaaagttttacagaccaatcgttgaaattttcgcaggaattccatcagttgtttatggatgggttggacttacagtcctgattccggcaattaagaaagtatttcatttacaagttggacattcagttcttgcggcagggattgttttggcactgatgatcttcccaaccatcagtaatgtggcagcagattccattcattctgtgccaaaagattaccgtatggcagcctacggactgggttctacaagatggcagtccatttataaagttgtcattccggcagcaggttcaggaattctttcaggaattattctcggacttgcgagagcattcggtgaggcacttgcggttgcaatggtaattggacagacaacagctcttccaaagggattattctccacaacaaagagtttgactacagaaatcgcagcacagatgggaaatgcaacggagggcggtgagatgaagacagcactctggacaatggcattgttattgttcttattatctctgttattcatcctgctgatccattatttttcaagaccgaagaaagacaaagagtaagggggagcaaatagatgaatcgagtacaacgtgcgcgtggaataaatcaaataatgaccggcgtgttttatctgatcgcagtgttcttctttacattattgattggatttgcatcttatgtaattatcaaaggatttacaggagcaacaccggagatgtttgcctttgcgagaaaaggaagcatcggaaaccagttgttcaatacaatttatctagtatttatttcgttgttattctccattccgcttggagtgacagccggaatctatctggcaatgtatgcgaagaaaggatttcttacaaaatttctaagaatctgtattgagacactttcttcgcttccgtccattgttgttggattgtttggatatctggtatttcttgtgtttttcggacttggaaagagtcttctcgcgggagcattatcagtttctattctggcgatcccagttatcacaacaacgacagaggacgcgatcaatggtctgccgggacattacctgcaggcaagtcttggacttggagcaacaagatggcagtccatttatcatgtgttgatcccggcgtgtatcccaagaatcatgacaggtgtcatcctggcagcaggaagaggatttggtgaggcggcagcacttctgtatacaacaggatcaggaacagatctgcgctggaacaactggaatctgacatccccaacctgcccgctgaatattttccgtccggcagagacattgtcattgcagatctggggacttcagatcaatggacaggatccgaatcttgcaaacctgtcagcagcaatcctgatgattcttgttctgctgttcagcattggcgcaaatgcattgagccgacacattaataagaagaattcaggaaactaaagacagaaaatgaaagaggaagccaactgataatttctatgtcaatcatttcgttgactggcatgtagaaaggataattaataaaaatggaagcaaaaaaagcaaatgattataaatttgatatcagccatctgaatcttcattatggagacttccatgcactcaaagatgtgaatatgaagatcgaggcgaataagatcactgcatttatcggaccttccggatgtggaaaatctacatttctgaagacactgaaccgtatgaatgatctggtggaaaattgtaagattgatggaaatgttctgctcgacggtaaggacattttcaaggaaatggacgagatcacactgcgtcatcgtgttggaatggtatttcagcagccaaatccatttccaaagagtgtgtatgacaatgtggcttacggaccgagaattgccggaatcaagaaaaaatctcagctggatgagatcgttgagcgaagccttcgtcaggcagcgatttgggatgaactcaaagaccgtctgaataaaagtgcgctcggactttccggtggacagcagcagagactttgtatcgcaagaacactggcagttgagccggaagtaattctgatggatgagccgacatccgcactggatccaatctcaacatctaagattgaagaccttgcgatggaactgaaaaaagattatactatcgttatggtaacgcataatatgcagcaggcagtccgtgtatcggataacacagcatttttcctcttaggagaagtgattgagtataatgacactgagaaattgttctccattcctgaagataagagaacagaggattacatcacagggaggtttggttgatttatgcgtaacagatatgatatgcagctgcatcttttggatacacagcttacacatatgggtgagttgtgtgaaacagcaattgcaaaggtaactcaggcattaaaggaaggtaacacggaacaggctaagattgtgatcaaagaagatgaagagatcgatcagattgaaaaagatatcgagagactttgtctgaagcttctgctccagcagcagccggtcgcaagagacctcagaagaatctcagcagcacttaagatgatcacagatatggagcgaatcggagatcagacttctgatatcgcagagatcatcatttcatccaagtgggagaagatggatgagaatcttgacaagctgacagcgatggcaacaggcgtaagcaaaatggttcgcaacagtgtaacagcatatgttgagaaagatctggagcttgcacgtacagtcatgaatgatgatgatgagattgatgattattttgatgagatccgggatcagatcatccagctgatccgtgagggtgatggtcgtgatggaagaaaactctttgattttatcatggttacaaagtatcttgagcgaatcggagaccatgcgacaaatattgccgagtgggtagaatttgcaattaccggagtgcataaggatagtgctgtaatgcattagaaggagaaagaaatatatgattttttgtgtagaagatgacgataacattcgcgaacttgtaatctacactctggagacaaccggactggaagccagaggattcgcagacgggacagcatttatggaggctttggcgtttgacacgccagagcttgttttgcttgatattatgcttccaggggaagatggacttgagattcttaagaaactgaaaaattcatcaaagacaaaggatatccctgtgatcatggtgacagcgaaggggtcagagtatgataaggtagtgggattggattccggtgcggatgattatgtgacgaaaccatttggtatgatggagctgatttccagaatcaaagcagtgcttcgcagaagtggaaagcaacaggataagacgaaactttctgttggaggaatcagcttagatacgaagaaacatgaagtaaaagtagatggcgagcaagttgtgctgacattgaaggaatttgaacttcttgagaaattgatgcgcaatcagggaatcgtgctgacaagagaccagctactgacagagatctggggatatgattttgatggagagacgagaacggttgatgttcatatccggacactccgccagaagttaggtgagcagggcagtctggtcaagacagttcgtggtgttggatatcggatcggtggagaagcgtaatacaagtctggaggatatgagaaagtgagaaaacgaattcagaaaagcatgatgtttatactgattgcaattttagttccgatatatctgatcatgtctgttgttgtgtatcagcggaacctgaagatccttgagggtgagatcaaacaggaagcagcgtatatcaaacgggcagtcgatctgtcaggaacagagtatcttgcacagctggatgatgtggatcagggaacgcgagtgacgctgatcgcatctacgggagatgttctgtatgattccagaaatgatggaagtacgatggagaatcataagaccagagccgaagtacagcaggctttgaagaatggaacaggcgagaagatccgtatgtcagataccgtaagcaaagaattgtattattatgcggttcttctggatgatgggaacgttctccgtgtttcaaaatcaatggatagtctgatgtggacttcattaaatattttgccggtggttatagggattggaatcattggacttgtacttgcctggtttcttgcaaaatggcagacaaacagactgatggaacctgtaattcatctggatttggaaaacccattggataatgttgtatatgaggagatgaccccgcttttggaagctatggataagcagaataaagaaaaagaagctgtggccaatatgcgtaaagaattctctgcaaatgtatcccatgagctgaaaactccgctcacttcgatttccggatacgcagagatcatgatgaatggactcgtgcgtccggaggatattccgagattttctgagacaatttataaggaggcacgtcggcttttgacattgattgaagatattattaaaatatcaaagctagatgacgaatctgttgagcttgagaaagaagatgtagatttatttgaactgacgagagaaattgtcagtcgtctttctcttacagcggctcagcggaatattcatatggaactgacaggagaatctgtgaaaatacatggaatccgtcagattctggatgaaatgatctataacattacagaaaatgctgtaaagtataataaagaaaatggaaatgtaaccatttgggtaggaaatacactggaaggaccgaaagtccgcgtgagtgatacagggatcggaattccaaaagaacatcaggatagaatctttgaacgattctacagagttgataagagtcattcgaaagaacggggtggaacaggacttggactgtcgattgtgaagcatggagcaattctgcatggggcgaaagttcaggtggatagtgagtacggaaaaggaacaagaatggagattatatttcctgagaaataaaatagtgctgttttacgcaggagaagaggaagaaaaccttccttttcttctgcgtttttgcttgaatcaaacaagaggttgtgctaggatagatataacaagtggaaaatatcccctgcggctgattttacgttactgttcactcccgtgtcaatcactccgctgattgacacggaggatgcgtgttttgacttgaatgcatctcgccccatcgccaaaggcgatttaaaatggcgagatgcgttgctggtcgcacatcgtgtgagcagtaacgattttacagaagacagcaggagatctgttttacacgaaagagaaaggggctacgcgtatgctgatagaagttgatttcaacagtgatgaggcgatttacattcaattgtgtaaccagatcattcttggtattgctatgtcagatattcaggaaggggattcactcccatctgtcaggcagcttgcggatacggttggagtgaatatgcatactgtgaacaaagcatatcatgtgttgaagcgggaaggatatatcagtctggataaacgcagaggtgcagtgatcgcagttgatgtagataaatttcagcagctcgaagcgatgaaagagcagttaaggatcgtacttgcgcgagggcgttgcaagaatatctcacggcaggaggttcatgggctggtagatgagatatttgacgagtatgagctgcacgagaaccggtagcagagaagtagaaagacataagggagatatatatgcagatttcatatacaaagtcggcgcagcatgcgcttaagtatgcggctagagctgccagagagatgaagcatccgtatatcggaacagaacatttgcttctggcattgagagaagaatatacaggagtggcaggacaggtacttgcgaacagtggagtagagtcggagaagatcctgaagctgatggatgagctgatcactccggcagaagaacatccggcagcgaaaggaaagagattagaagagagtccgagactccagtatctgttagagaacagcgcgaaggagtgtaaaagactccgtacaacggaaatcggaacagaacatctccttcttgcgatgatacgtgatgtggattgtgtggcagcaaagattctgatcacattgaatgtgaatcttcagaaattattccagagcattatgaatgcagcagggatcgatccgaagatctatcaggaagaacttcaggaggataatcgcggaagcggtgcgatgatggagcagtactgtacggatctgacagaacgtgcggcagaaggaaaaatggatccggttgtgggaagaaaccaggaaatttaccgtctgatggagattttaagccgaagaacaaagaacaacccatgtctggttggagaaccgggagtcggtaagacagcaattattgaaggtttagcacagagaatcgcatccggtgtggttccggagaagatgaaagataagaagatttacagtctggatcttccgggactgatcgctggttcaaagtaccgtggtgagtttgaagagcgtatgaaaggcctgatctcagaagtagaagcctgtggaaatgtgattctgttccttgatgagatccatacgatgatcggtgccggaggcgcagaaggagcgattgatgcatccagcattctgaaaccttcactggcgagaggtgagatgcagctgatcggtgcaactacgattgcagaatatcggaagtacattgagaaagatgcagcacttgagcgaagattccaaccggtgacgattgaagagccgacacaggatcagtgtattgagatcttaaaaggtctgaaagagaaatacgaagcgcatcataaagttgtgatcgaagaacaggcactggagtcagcagtacagctgtcagagcgttacatcacagaccggaatcttccggataaggcgattgatgttttagatgaagcatgctcaaaggtgagtctgaagggatatgaggttccagagaatctgaagcagttagaacaggcagtgaaagaacttgcttcgcagaaggaagagagcattgagcggggagattttgcagaagcgtccctgattcagaaagaacaggatgcagtgcagaagaaattagactcagtgaagaaacgctttgagaagaaacaggcgaaggccaacccaccggtaactgtagatgcggttgcagaagtggtgtctgcctggacaaaagtaccggtgagtaagctcgcagagagtgatgcccagcgtctgaagaatctggagcatgtccttcagaagagagtgatcggacaggacgaggctgtcggcgcagttgcaagggccgtgaagagaggaagagtcggactgaaagatccgaagcgcccgattggttccttcctgttcctgggaccaaccggtgttggtaagacagaattatcaaaagcactggcagaagcattatttgggaaagaagatgcaatgatccgtgttgatatgtcagaatatatggagaaacattccgtttccaagatgatcggatctcctccgggatatgtcggtcatgaagaaggtggacaactcagtgaccaggtgcgtacacatccatattccgtgattctgtttgatgagattgagaaagcacatccggatgtattcaatgtacttcttcaggtgctggatgatggacatattacagattctcaggggagaaaggttgacttttctaatactgtaatcattatgacatcaaatgcaggtgcgaaagcaattgttgaaccgaagaagctaggatttgcgacaaaagaagatccggcgagtgattataagaagatgaagcagaatgtgatggacgaagtgaaacagatcttccgtccggaattcctgaaccgaattgatgagattattgtattccattcactcggcaaagaagagatgaagaaaatcgtttctttgttatgcaatcagtttactaaacgtctggaatcacagatgaatattcatctgaaactgcgtgaatctgcgaaggctctcattgtggagaaaggaacggatgcgaagtacggagcaagaccactgcgccgtgcattgcagacagaactggaggataagctggcagatgcgatcctgaacggagagattcaggaaggggatcatgtggcagcaggagcatccaaaaagggaattcattttgtgaagacagaatcttaaaatcacatcgaattgtaaatgtgaagaataaataaaatctatagaaaaactattttaagtagtatataataggaacatatatatacccaggaggaaattaaaaatggcaacagtgaaagaattattgcgtgcagagaacgacggaacattaagctttggagattacactcttgcatccaagacaaagaaggacggatttgaatttaaaggagatctttataaagtaaagacatttgcggagattacaaagctggagaaaaatggaatgttcgtttatgagtctgttccgggaagtacagtagagaacttcaaagagacagaaacagaagttgagttcacagtttccgcaccggaagacgtacagtttacattggaacttgagccggagagcgaatatgaagtatttatcgccggagagtctgcaggtaagatgggaacaaacttaagcggaaaattaagtgtaagtgttgaacttaacgcagatcagagtgctgcaatcaaagttgtcaaatgctaatcagtcagattcggatagaaacaagagtagtgtaaaagcagagggaaaggaattgcaagatgcgcctttcccttttctaatctataaacctggcaagctgtattatgcttgctttgaacagaaaggaaattatgaatggcaaaaggaaagaaaacagtttacttctgtcagaattgtgggcatgaggaagcgaagtggctcggtcagtgtccaatgtgtaaggaatggaatacattcgtcgaggagaggattgacagtggcatcacgaaaggaacgactgtagcagccagagcggtgaatgaagcgaaagtggttccaatcacagaagtttccgcggatgatgatacaaggaataagactggaattaaagaattagacagggttcttggtggtgggatcgtgccggggtcactcgttctggtaggaggagatccgggaattggaaaatcaactttgctcttgcaagtctgccagaggatggcgaagcagcagaagattttatatatttcaggtgaagagtctcagactcagatcaagcttcgtgcaaaccgtatgggtgaattcagccagaatctgttgcttttgtgtgagacgaatcttgggattatccgtagtgtgatcgagaaagagaagccggagcttgtgatcattgattccatccagacgatgtacagtgaagatgtgaattccgcaccgggaagtgtctcccaggttcgtgagtctacgaatgtatttatgcagctggcgaagggactatgtatcccaatcttcattgttggccatgtgacaaaagaaggaaccgtggctggtccgcgtgtgctggaacatatggtggatacggtactttattttgaaggagatcgtcatgcatcttaccgaatcctcagagctgtgaagaatcgttttggctctacgaatgagatcggtgtctttgagatgagacagaatggacttgtagaagtagagaatccatccgaatatatgctgagtggaaaaccggagaatgcatcaggttctgttgtagcctgttcgatggagggaacacgcccaattcttctggagattcaggcactagttgcaagaacgaactttggtatgccgagaagaactgcagcaggaacagattataacagggtgaatcttctgatggcagtacttgaaaaacgacttggtatgaatcttggaaattgcgatgcttatgtaaatattgcgggcggaatcaagatgaatgagccggcaatcgatctcggaatcgtgatggcacttgtgtcaagttaccggaatcgtccgatcgatgaaaaaacgatcgtgttcggtgaggttggtctgagtggtgaggtacgtgcggtgaatatgccggagcagcgtgtggctgaggcgaagaagcttggattcgagacgtgtatccttccggaagtgtgcatgaagacggtgaaggatgttaagggaatcaagctgctgggtgtgaagagtgtgaatgaggctgtggcgattttttagtaataagaaacattgcaaggttataatgaaatagagcaaatgaagaaagaagtttctgatataagatgaaaattttacgttagaaacttctttttttatattttaagatgtgttttggtttacaacacgctgaaaaataatggataacggagtaatataataaacctttgctctaaaaaataaaaaagcaaacagtatataacagttgacaacagtgatgtgctgttatatactgtttacaacaggaggttgcttatgaagattataatcaataattcatcgatggtaccgatctatgaacagatcatggagcagatcaaggcgcagatcatctccggagaattaaaagaaaatgatatactgccgtcagtgagaacgatggcaaaggaactgaagatcagtgcacttaccgtaaagaaggcatatgacaatctggaagcggagggcatgacggtcacggttcatggaaaaggaacttatgttgcagcttcgaatacacagttgatggaagaagagcgcagaaaagaagttgaggcggatttggaagcggcgattcagaagggaagacgctgcggaatgaaagaggaagagatccgctccttgtttgaactcatcatggaggacgaataattatgttagatatcaaaggggtaaagaaaagctacggcgaatttcagttagactgttcgctaaatgtagaaaaaggaagaatcacaggtctggtcggagagaacggagccggtaagagtaccgtgttcaaggcagtgctaggactcatttcttatgatggtggcgagataaagattcttggaaaaaaaccgcaagagttaaacgagaaagagaaagaacagatgggagtagtcctggcagaagcagggttcagcggatatttgaaaggaaaagatgttgaggcagttcttgccaaattgtatccaaagtttgaagaagaaaaatttcttcagatgtgtgaaagatatcagattccactggataaattcttaaaagagtactcaaccggaatgaaagcgaagctgaatctgatcattgcattgacgcatcaggcagattttctgatgctggatgagccgacagccggtcttgatgtcggagcaagagaagggatgctggatattttgagaacatatatggaagaagagccggagagaagcatcctgatcagttcacatatatcttcagacttagagcatctgtgtgatgatatttatgtgattcataaaggaaagatcgtacttcatgaagagatggatagaattcttgaaaagtatgccatgttgaaagtcagcgaggaacagtatcaggctttagataaaaactatatcctgaaagagagaaaagaaaatttcggaattgcctgtctgacaaatgagaagcagtattatacagaaaattatccggaaattgtagtggaaagcggatcactcgatcaggtgattctgatgttgacaggaggcgggatgtgatgaaaggaatcagaggacttttggaaaaggattttcggttgttttttcggcaaggtggcaatcttttttgtgtgttagcgtttgtggcgttattttttacgctgacggaaaagaagacagctacttttattgcaatctatatcccatctgttatagcagtatatgcggggaatacaattagttatgatgaaaacaatcatggatatatgtatttattttctttacctgtaaatagaaaagtatatgttagagaaaaatatattttttcctttattatgacagcgtgtggatggtgtattggagtaatctgtgcaggaatcactgtactcataaagccagaagaagtgtttgatccggaaacgctggcaatggagttgatcacaatctttgtatttcaggcaattgcgggaattacgattgcaattcggttaaggtttgaaggagagaaaggacgattagtgctaccaattgcaattttaattgtttttgcaatttgttatgcaattggctcttttgtgatggataacctgggattaaaagaaagtattttgtatatgatagaagggataggcgattttgaaattgcgattgcacttatcgtgctgagtctgcttgtatggttcatttcttatatttacagtatgagagtcatgaaaaagaaagagttttagttattgttcactcccgtgtcaatcacttcgctgattgacacggaggatgcatgttttggcttgaatgcatctcgccccatcgccaaaggcgatttaaaatggcgagatgcgttgctggtcgcacattgtgtgaacagtaacgagttttaagatggagtgatgaaatcagatggtgtcagccatttggtttcatcatttttatatattgaatttaattaactatctaacttgtttgtgtgcaaaaagtattaagaaagtgtgaaaaaatagaaataatattgacttactttgtgaaaagtactatattttcatttagttaattaactaactaattttcactattcattctgtggaaaaagtgatagtcagaatttttttgtagaatgtatcaataatcaaggagggaaaagaacgtgaagtgtcataaagaggatgccccattacttggattgatgggacagagtatgcgcctgatcggaaagagagcacaggaattgtatgcagaatacgatttgaacagagcccagtcagggatcttatttgcccttcatcaggaagattccatgtctcagaaagaacttgcgaagcgcctgaatgtaacgccgccgtcaattacatcgatgatcaagaagatggaacaggaaggttacattacaagaaaagccgatgaacaggaccagagagtgatgcgcctgactcttgcacagaaagggagagacagcattgcttatgtgatcaagacagctgagaaactggaagaaaaagtgtttgaaggaatgagcgcggaagagaagatgctttttcgccggctgctcctgcagattatagagaatgtggagtagtgaatgaagtagattactgtcgctgagaatcagcggttagtgataaattgtgtaacttgaagagagttgttgttgcttacacatattgcgaacagtaacagagaattaccaggaaaggaaatacgcagattatgaagaacttattcaaatacgctgcatcatactggaaagctatgattgcgatcgtgctgattctggttgtgcaggcgtattgtgatctgtccttgccggcctacacatcagatattgtaaatgtaggaatccagcagggcggtattgaagatgatgtaccgagacagattgcaacagaagaaatggaaaaattgcttttgtttgtatcagaagacgatcaacagacggtgatggatgcatatacagaagataatacttcttataaaaaagaagcttatgtcttgaaagattctgttgctgaagaggaaaatacgatggagaatctgaaagatattcttcagattccaatgatgatgacatccggaatcgagtccggaagtgatacaacaaaacagatggaagacaagctgaaagagcagatgtcccagggaatggcgcagagcatgccacaaggggcagaccggacaatgccggaaggaatgccacaaggtgaatctcaggcggaatcccaggcagtgtcactggatgacatgtctatgtttgatcttctgaaaatgcttccggctgagcagagagcaacaatggttgagaagattgaagagcagatgtcagagatgccggatacaattcttgatcaggcatcagtgagcttctgcaggagtgcatataaagaccttggaatggacatggatcagacacagattcattatctgttaaaaacaggaggtcagatggctgcacttgctcttcttggaatggtagcaagtattatggttgcatttctggcatcaagagttggagcaagtgcaggacgtgatctgagaagtggagtattccataaggttgttggattttcaaacaacgagttcaatcacttctcaacagcatctttgatcacgagaagtacgaatgatatccagcagattcagatgctgatcgttatgctgcttcgtatggttctgtatgcgccaatccttgcaatcggtggagtgctgcaggttatgaagacgaatgtatccatgtcctggatcatcggacttgcggttattatcattgcatttgtagttttgttgctgttccttgttgttatgccaaagttcaaagtgctgcagaatcttgttgacaagttgaaccttgtaacaagagagattctgacaggacttccggttatccgtgcattcagtacagagaagcatgaggaagagagatttgatgatgcgaaccgcactctgacaaagacgaaccttttcgtcaatcgtgcgatgacatttatgatgccggtgatgatgttagtcatgaacggtgtatctgttctgatcgtatggacaggagcacatggaatcagtgatggacagatgcaggttggagatatgatggcatttatccaatatacgatgcagatcattatgggattcttaatgctttgtatgatttcaattatgcttccaagagcagctgtggcagcagaccgtgttgaggaagtattgaagagtgagacaatgatccacgatccaaagcaagaaaaacatttcccagaagacggaaaaggagtacttactttcgatcatgtatctttccgttatccaggtgcagatgaagatgttctggaagatattacatttacagcgaagccgggtgagacaacagcaatcattggaagtaccggaagcggtaagtctacgctggtaaatctgattccacgtttctatgatgtgacatccggagacattacgctggatggtgtagatatccgtgaagtgaaacagcatgaacttcgtgagaagcttggatatgttccgcagaagggggttctgttctcgggagatatcgcatctaatatcatgtttggtaattcacatggaagcgatgatgagatgatcgaggcggcagagattgcacaggcaacagaatttattgacacaaaaccggagaaatataagagcccgatctcacagggaggttcgaatgtatccggtggacagaagcagagactttctattgcaagagcaatcgcaaagcacccgcaggtatttatttttgacgacagtttttctgcccttgactataagacggatgtaacactccgccgtgcgctggctgaaaagacaagcggaagtacggtgctgatcgttgcacagagaatcagcacgatcctgcatgcagagcaaatcatagtattggacgaaggcaaagtggcaggtaagggaactcatgcggagcttctcaagaactgtccggtataccgtgaaatcgcagaatcccagctgtccaggaaagagttagaagcagcgttaaatgagcagacagatggaaaggaggatcagattcatggctagaatgcatggcggtcgaagaccgaatgaaaaagcaaaagacttcaaaggaacaatgaagaaactgatccgctacatggcaatttacaaagtacaggtatttttcgtagccgtgtttgctatctgtggaacgatattcaatattgtcggaccgaagattttaggaaaagcaacgacggagattttcaatggacttgtaagtaaagtttccggtggagacggaatgaatttcggtaaaatcggacagattctgctgactgttctttgcctgtatgtgatcagcgcaatctgcagttttgtgcagggatatttgatgacgggggtgtctcagaagacaacctaccgtttgagaagagaaatctccgagaagatcaaccgcatgccgatgagctattttgacacaaagccggtaggtgaagtgctttcccgtgtgacaaatgatgttgacacacttggacagagcctgaaccagagtgcgactcagatgatcacatcggttacaactctgattggtgtatttatcatgatgttgtcaatcagcccgctgatgacagtgattgcagttttgattcttccgctttctgccggattgatcggattcgtaatgaaacattcacagaaatatttcgtagggcagcagacataccttggaaatgtgaatggacaggtagaagaaatctatggtggtcataacatcatcaaggcgtttaataaagaagaggaagtaattgaagtattcaatgaaacaaatgataagctgtatgattccgcatggaaatcccagttcttttccggtttgatgatgcctgtaatgcagtttgtaggaaacttgggttacgtggcagtggcaatccttggcggatatctgacaattaaggatgtgatcgaggttggagatatccagtcctttattcagtatgtacgtaactttacacagccattgcagcagatcgcacaggtggcgaatatgcttcagtcaacagctgcagcatcagagcgtgtcttcgagttcctggaaggaccggaagaagatcagacagtagagaatccggtttctgtagagaatcttcagggaaatgttgaatttgagcatgtacgttttggatataatgaagataagatcatcattaatgacttctcagcggatgtgaaagaaggccagaagatcgcaattgttggtccgacaggagccggaaagacaacaatgatcaaattgctcatgcgtttctatgatgtgaatggaggttcgatcaagattgacggacacgatgtccgggacttcaatagaagtgaactccgtgaaatgttcggaatggttctgcaggatacctggctgttccatggtacgatcagtgacaatatccgttatggaaaactgaatgcgacagaggaagaagtgattcaggcagcgaaggcggcacatgtgcatcgtttcatccagacacttccgggtggatacaatatggaactgaatgaagaagcaagtaatgtatcccagggacagaaacagctcctcacaattgcaagggcaatccttgcagacccgaagatcctgattttggatgaggcgacaagttcagttgatacccgtacagaagaaatgatccagaaagcgatggataatctgatgaagggaagaacaagctttgttattgctcatagattatcaacgatccgagatgcagatctgatccttgttatgaaggacggagatatcattgagcagggaaatcatgaggaacttcttgcaaaaggcggtttctatgcagatctgtataattctcagttcgaaagtacgacagagatcgcgtaaaataataagaaactctattatctcttccggattagaatatggcagggataatagagttttttctataaagggttagctaaaaattcaatcgtatattgttcaagtgaagcaagaagcttatcaagtggaaataccttaagatcatttactgcatccacggtaacactgagatatccatgcaatgaatccaggacttgctgtacatttccatactgaatttcattgatccctggatttattatctgtgcgttcagatcgagtggaatgtgatagcggtttacaagataagtattcatctttgtatagtccccgtaataatattcctcagtaagatatttttcaaaagggatataagtctgaaaatttctgatataaacggttacaatctcttcttttatatctgtgatttgtccactttcatcataaaaatcaacaatttccggaataaaatccttgaaaaaccgacggtcgatatataaatgaaaataatatcccaaaacactggaatcagaaagaagagagctgtatttagcaataaaacgtgttaaatccggaaataccatcatcttatcacgataaacaggattccggaaatgtgaaagatctttttggtctgtcgcatccggtagaagattcccgatcagaaaatcatttacagattgaatcggataaggaaaatcagggtactcgtgaagatggcttcgcagcatctgggctgcagttaaatgtaaaataaaaccaggcatgagaaaatcctttcatatataaagctgatactatcttaacatgaaatgagtatattatacaagcaagcttgcaatagctgtcgtgttttgaaatgtatgttacgcatctgcaacaaccgaaagaactgacgtcctttcggttaagggcattcgccctatgttccccaatcctaccagtttattgcaagcaagcttgcaaaatctgttagagttggggaacgcagatgctaatttttcagaatattctgaattgcatgaaatatataaaaaacattgacaattagaaatgactatgataagataacattcgtcgctgagaacggcactgaaaactacagaacagacgcttgaataagaggaaggcgcggaggcggacagtccctgagagagaaaaagttcgaagaaaagatttataagtaaagatgataaaaacttataagaaattttaaaaagtggttgacagaaaagtttgaatgtgatagcataaatacactgctagtgagaagtaattaaacggattcggcagtgaaagaaaaaaataaaaaagttcttgacaaagacaaaagcttttgataaaatataaaagctgtcgcttggaaagaacgacacaaacaaagaaccttgataactgaacaatagacaacaacaacccttgaaaatttctttaagagaagatttttaagaacggtttttaaacaaaccaaaacaacagtaaaaagggaagaattagctagttagttggttctgaactggatacaaacacttttaacgagagtttgatcctggctcaggatgaacgctggcggcgtgcttaacacatgcaagtcgaacgaagcaccttgatttgattcttcggatgaagatcttggtgactgagtggcggacgggtgagtaacgcgtgggtaacctgcctcatacagggggataacagttagaaatgactgctaataccgcataagaccacagcaccgcatggtgcaggggtaaaaactccggtggtatgagatggacccgcgtctgattaggtagttggtggggtaacggcctaccaagccgacgatcagtagccgacctgagagggtgaccggccacattgggactgagacacggcccaaactcctacgggaggcagcagtggggaatattgcacaatgggggaaaccctgatgcagcgacgccgcgtgagcgatgaagtatttcggtatgtaaagctctatcagcagggaagaaaatgacggtacctgactaagaagcaccggctaaatacgtgccagcagccgcggtaatacgtatggtgcaagcgttatccggatttactgggtgtaaagggagcgtagacggagtggcaagtctgatgtgaaaacccggggctcaaccccgggactgcattggaaactgtcaatctagagtaccggagaggtaagcggaattcctagtgtagcggtgaaatgcgtagatattaggaggaacaccagtggcgaaggcggcttactggacggtaactgacgttgaggctcgaaagcgtggggagcaaacaggattagataccctggtagtccacgccgtaaacgatgactactaggtgttgggcagcaaagctgttcggtgccgcagcaaacgcaataagtagtccacctggggagtacgttcgcaagaatgaaactcaaaggaattgacggggacccgcacaagcggtggagcatgtggtttaattcgaagcaacgcgaagaaccttacctgctcttgacatctccctgaccggcaagtaatgttgcctttccttcgggacagggatgacaggtggtgcatggttgtcgtcagctcgtgtcgtgagatgttgggttaagtcccgcaacgagcgcaacccctatctttagtagccagcggtttggccgggcactctagagagactgccagggataacctggaggaaggtggggatgacgtcaaatcatcatgccccttatgagcagggctacacacgtgctacaatggcgtaaacaaagggaggcagaaccgcgaggtcgagcaaatcccaaaaataacgtctcagttcggattgtagtctgcaactcgactacatgaagctggaatcgctagtaatcgcgaatcagaatgtcgcggtgaatacgttcccgggtcttgtacacaccgcccgtcacaccatgggagtcagtaacgcccgaagtcagtgacccaaccgtaaggagggagctgccgaaggtgggaccgataactggggtgaagtcgtaacaaggtagccgtatcggaaggtgcggctggatcacctcctttctaaggaagaaatgctttctttcgtctggaacaatccaactaaaacggaagaaagaagtagagagtttttactgttgtctattgttgggttatcaagtaacctaaaccttttggtggcgatgcgcttaggggtaacacccgttcccatcccgaacacgatggtaaagacctaagcggccgatggtactgcactggagacggtgtgggagagtaggtggccgccaaattaaaaagaaaataaaccgagaggttctgcgataaagctggtcttcaccagtgatcagagtttaaaagaaagcttttagtctctgatgactgatgaaaaagtcagtcggatgaagaactgaataaggacttcatcttatgtaccttgaaaactgcatatagtaaaaatcaatagatttagataaatatctaatcaagacatccgaggtaatgttaacaacattaacttacagtctgaagaaaacagacttaaaacaaattgactatcaccaacgcatacaacgctatgtatgtgtggacgttatcccattcccgtgggatgaggtcgagttggttatgctgataagagcgtatggtggatgccttggcactaagagccgatgaaagacgtgataagctgcgaaaagcttcggggaggagcaaatatcctttgatccggagatttctgaatggggaaacctacttgagcaaacctcaagtatccttaagccaatacataacttaaggaagggaacccggtgaactgaaacatctaagtagccggaggaagagaaaacaacatgtgattctgtgagtagcggcgagcgaaaacggaagagcccaaaccagcgtgcgtgcatgctggggttcggaccgcggaattgattcaacgagtttagcagaacggttttgggaaagccggccagagagggtgaaagccccgtaagcgaaagacgagttgacatggcgggatccagagtaccacgagacacgtggaaccttgtgggaagatgcggggaccaccccgtaaggctaaatactacttagtgaccgatagcgcatagtactgtgaaggaaaggtgaaaaggaccccgggaggggagtgaaaaagaacctgaaaccatatgtttacaagctgtggaagagctttatatgctcaaccgcgtactttttgtagaacggtccggcgagttacgctggctggcgaggttaaggactaaaggtccggagccgaagggaaaccaagtctgaatagggcgcatagtcagtcggagtagacccgaaaccgggtgatctatccatgtccaggttgaagttgccgtaaaaggcaatggaggaccgaacccacatccgttgaaaagggtggggatgaggtgtggataggggagaaattccaatcgaacccggagatagctggttctcctcgaaatagctttagggctagcctcatacgagtcttgcggaggtagagcactgaattcctaagggggcgtcaaagcttactaagggatatcaaactccgaatgccgtgtagatgatgtatgggagtcagacgatccgagataagttgggtggtcaaaagggaaagagcccagaccaacagctaaggccccaaaatgtgtgttaagtggaaaaggatgtgggatttcgaagacaactaggatgttggctcagaagcagccattcattcaaagagtgcgtaatagctcactagtcgagaggtcctgcgccgaaaatgtccggggctaaaacacactgccgaagctttggaattgagaattcaattggtagaggagcattcttaaagggacgaagcagtaccggaaggagctgtggacttttaagaagagagaatgccggaatgagtagcgagaggaaggtgggaatccttccggccgaatatctaaggtttccagagtaaagctgatctgctctgggtaagtcggggcctaaggcgaggtcgaaagacgtagtcgatggataacaggttgaaattcctgtactatcctgtaacagaactgtggggacacaggcagagagcgtgagccgggaatggaaagaccggtacaagcgaggtaggagaagagttggcaaatccgctctttaatctgaagacgtgatgtggactgaaaataagtagggaagcacgtgagctgactgtcaagaaaagccgctattgtttgcaggatacccgtaccgtaaaccgacacaggtggatgaggagagaatcctaaggccgacgggagaagcattgttaaggaactcggcaaaatgactccgtaacttcgggagaaggagtgccagtaagatggccgcagagaattggcccaagcaactgtttagcaaaaacacaggtctatgcaaaaccgaaaggtgaggtatatgggctgacgcctgcccggtgctggaaggttaaggggagaggttagcgcaagcgaagctttgaacttaagccccagtaaacggcggccgtaactataacggtcctaaggtagcgaaattccttgtcgggtaagttccgacccgcacgaaaggcgtaatgatttgggcactgtctcaacaatgcacccggtgaaattgaaataccagtgaagatgctggttacctgcgccaggacggaaagaccccatggagctttactccagcttgatactgggattcggtattgcatgtacaggataggtgggaggctaggaaatggtaacgccagttgccatggagccaatgttgggataccacccttgcagtactgggtttctaaccagcagccgtgatccggctgggggacaatgtcaggtggggagtttgactggggcggtcgcctccgaaagggtatcggaggcgctcaaaggttccctcagaatggttggaaaccattcgaagagtgcaaaggcagaagggagcttgactgcgacaccgacgggtggagcaggtacgaaagtaggacttagtgatccggtggtataaagtgggattgccatcgctcaacggataaaagctaccctggggataacaggcttatcactcccaagagttcacatcgacggagtggtttggcacctcgatgtcggctcatcgcatcctggggctgaagtaggtcccaagggttgggctgttcgcccattaaagcggtacgcgagctgggttcagaacgtcgtgagacagttcggtccctatccggcgtgggcgtaagatatttgagaggagctgtccttagtacgagaggaccgggatggactggccgctggtgtatctgttgtcttaccaaaggcatagcagagtagccaagccgggaagggataaacgctgaaggcatctaagcgtgaagcccccctcaagatgagatatctcataacgtcaagttagtaagaccccttgaagacgacgaggtagatagggcagaggtggaagtgtggtaacacatggagctgactgttactaataggtcgagggcataaccaaagcagtgataggtttggatgatgatgttggttttgactgtatgtagttttgaaggtacatggaatatagacaggaatgagaagcagtgcgaaagcactgttttttctttgcaaaattaaaacggagtatctttgttgacagcaaaccaaagtgtaaattggaatttttccatagaacgaaatgtattaagatatcagattaatagatataacaactaacttgatctattttaacatcgcttgaccatatttaacgaatatagataaaaaacagattgcactctatttctgcttgacaaatcatacttctacgagctaatatatgacacataaagtttattattttaatttctaggaggagattattatgaagatgtggaaaaaagcagcaagtgtaatgcttgcatcagctatggtattttcattagcagcatgtggaagttcgggagatagtggaaagagcggaggctcatccgattctgacacttttaagattggtggtatcggacctacaacaggagatgcagcaatctacggaacagctgtaaagaatggtattcagcttgcagtagatgagatcaacgcagcaggcggaattaacggaaagcagattgaatacaagtttgaagatgatcaggctgattcagagaaatctgtgaacgcttacaatactctgaaagactggggaatgcaggcactgatcggaacaacaacttctacaccttgtacagcagttgttgaggagactcattcagataacatgttccagctgacaccatctgctacagcagtagacagtatccagtatgacaatgcattccgtatgtgtttctcagatcctaaccagggtagcgcatcagcagattacattgcagagaacaagcttgcaacaaaagtagcaatcatttataacagctctgacacatattcatcaggaatttatcagacatttgcgacagaggcaaaggcaaaaggacttgatgttgtagcagcagaagcatttacagcagataacaagactgacttctctgtacagatccagaaagcaaaagatgcaggtgctgaacttgtattccttccaatttactatcaggaagcttctctgattcttgctcaggcaaacaaagcaggatttacaccgaagtggttcggatgtgacggtatggacggtatccttgatcttgatggatttgacgcaagtcttgcagaagacttaatgttccttacaccatttacagcaaatgctacagacgaagcaacacagaaattcgttgctgattacaaagaagcattcggagacacaccgattcagttcgcagcagatgcttatgactgtgtatacgtaatcaaaacagcagctgagaaagaagatgttacaccggataagagcgtatcagatatctgtgacgcacttaaaaaaggtatgacagagatcacatatgatggacttacaggaaagagcatcacatggtcagaggatggagagcctacaaaagatcctacagtagttgttgttaagagtggagagtatcaggtacttcaggcagaagatgctgctgaataattgatatatcagattcgtttagaaaaataaatacagagagtagcaacgctctttgtagatacattaaaagaataggagaagtccccccgacagacatcgtttctgccgggggacttcttttaggagcagtgttagtcatttgatttacaagatgtttttccgttggtgtggccatagtttcaagcttgtgaattttctatagcatgctgttctatctttgtgctattatttatattatactttttataaatgtaagatatggtgtgcttctgaagaattctgaagaagcttaagaaaggaaaaaatcatgaatacagtaaaagtaagaaatattgaaattggcgctggaatcccgaaaatctgcgtacctattgttggtgtaacaagagaagagattcttgcagcagccgagaatatcaagtcaacaaaggctgatgttgttgagtggcgtgttgactggtatgaagatatctttgattttacaaagacagaggcgacaatgcaggcacttcgtgaggtgcttggggagatgccgattcttttcacattccgcacatcaaaagaaggtggagagaaagcaatcgagacagaggcttatgttgaactgaatcagaatgcggcgaagacaggacttgttgatctggtagatgttgaagcatttacaggagatgatgtagtgaaggctgttgttgagacagcacatgcaaatggagtaaaagtgatcgcttcgaaccatgacttccacaaaactccggcaaaagaggaaatcgtatcccgtttaagaaaaatgcaggagcttggagcagatattccgaagattgccgtgatgccacagaataagaaagatgttcttacacttcttacagcaacagaagagatggcaagcgagtatgcggatcgtccgatcattacaatgtctatgtcaggaacaggtgtgatcagtcgtctctgtggagaagtctttggatctgcactgacatttggagcagttgggaaagtatctgcaccgggacagatggggattgaagatctgacaacagtacttggattacttcataaaagtctgtaaataagaatccgcgaaagaagaaaaagacagtattcttcggtatagatagaaaaaaaggaaaatgttgtcttttttcttacaaaaagttaaaaaataacgcaggaaaacagagcggattctgttttttgtattgatacgagaaaataattatgctataatcaattcaatttaaaaggttaaagtagtaccttacaaaaatataaaaaggatgagagggacggatatgagctttatttcatatttagtaaatggactaagtcttggcagtgtctatgcgttgatcgcgcttggatacacaatggtatatggaatcgccaagatgttgaactttgcacatggtgatgtgatcatgatcggtgcatatgtagctttgatcacaatgaagcaggcaggacttcctacctgggtggcaatcctgatttcaatcattgcctgtacagtacttggtgttctgatggagcgtgtagcgtataagccgcttcgtaatgcaacatcttcacttgccgtactgatcacagcgatcggtgtcagctatctgcttcagaatgtagcacttctgatcttcggtgcgaatgcacagacattcccatcagtgatcaagtggagcggactttcacttgcagatggcaagctgaatatttcaggagagacaattgttacgatcgtagtttgtgtggttattatgatcgcattgatcacatttgttcagaaaacaaaaccaggacaggcaatgcgtgcagtatcagaggatagaggcgcagcgcaattaatgggtatcaatgtaaatgcaacaattgctcttacatttgcgattggttccggacttgcagcagtagccggtgtgcttctgtgttctacctacccgagcctgacaccatacacaggtgcgatgcctggtatcaaagcgttcgtggcagctgtatttggaggaatcggttctattccaggtgcatttatcggaggaattcttctgggaatcatcgagatactcagtaaggcatacatttcttcccagcttgcagatgcgatcgtgttcgcagttctgatcattgtgttgcttgtgaagcctacaggacttctgggcaagaagattcaggagaaagtgtaggtggatggaattatgttgaagaatatgaataaaacaaagagaagtaatctcatcacgtatgctatcgtgattgtagctttcgtagtgatgcagactttaagcagcacaggaagtatttccagtcttttgacaggacttcttgttccgctttgtacatatattatcctggcggtttctctgaaccttgtagtagggattctcggagaacttagccttggccatgcaggatttatgtgtgtgggagcattttccagtgcatttttctcaaaatgtatgagagatgtgatcgagaattcgattgtacgatttctgcttgcacttttgatcggtgttgtagtagcagcaatcttcggtgttatcatcggaatcccggtacttcgtctgaaaggcgattaccttgcaatcgttacacttgcgttcggtgagatcattaagaaccttgtaaatgtcctttatattggaaaggattctaaaggatttcattttgcaacaaaggacgttatggcacttgacatggatccagacggaacagttatcctgaacggtccgcagggaatcacaggaactccgaaggattccactttcctgatcggatttatcctgatcatggtgacattatttatcgtactcaacctgatcaattccagagacggacgtgcgatcatggcgatccgtgataatgtaatcgcagctgagtctatcggaatcaatgttacaaaatataaactcatggcatttacaatttcagcagctatggccggtgcagcaggtgttctgtatgcacacaacctgtcaacactgacagcaaatacaaacaactttggatacaatatgtccatcacgattcttgtctttgtagtacttggtggaatcggaaatatccgtggatctattattgcagcagttatcctgacactccttccggagcttctccgtggactgtctgattaccgtatgttgatctatgcgatcgttctgatcatcatgatgctctttaactgggcaccaaaggcaattgagtggagagagaagtatcttcactttggaaagaaaaaggaggcttaagtaagaatgagtacattattagatgtaaaaaatcttggaatttctttcggaggtctccgtgcggtaaatgactttgacctcaagatacagaaagaagaactttacggattgattggaccaaatggtgccggtaagacaaccgtattcaaccttctgacaggagtatataaaccggattcaggaaaggttcttttggacggaaaggatcttacaggaaagaaaaatattgagatcagtaaggccggaattgcaagaacattccagaacatccgtcttttcaaagaactgactgttcttgataatgttaaagtaggacttcacaaccatcatcattactctacgatcgaaggaatcttaagacttccgaattatcgtaaggtagaaaaagagatgaatgaaaaggcgatggagcttctgaaggtattcgatcttgagaagtttgcgtcatataaggctgcaaaccttccttacggacagcagagaaaactggagatcgccagagcacttgcgacagatccaaagcttcttcttctggatgagccggcagcaggaatgaacccgaacgagacaggagaactgatggatatgatccgtttcgtgagagatgagttccatatgacgatccttctgatcgaacatgatatgaaactggtaagtggtatctgcgaggagctgacagtactcaacttcggtgaagtacttgcacagggcaagacaacagatgtactgaatgatcctcaggtaatcaaggcatatctgggagaatagggggaagataacaatggcaatgcttgaagtcaaagacttagaagtatattatggaatgatccaggcaatcaaaggtatttcctttgaggtaaatcagggagaggttattgcactgatcggcgcaaacggagccggaaagacaacaacacttcatacaattacaggacttctttctccaaagaaaggttctgttatgtttgaaggaactgatatcacaaagatcccggcgcataagatcgtgtctatgggaatggctcacgttccggaaggacgaagagttttcgctgaactgagtgtttacgaaaacctgaaaatgggcgcctatacaagaaaagataaaaatgagattgaagagagtcttgcaaatgtttataagagattcccacgtctggaagagagaagaaatcagatggccggaacgctcagtggtggagagcagcagatgcttgccatgggacgtgcactgatgtctaaaccgaagatcattctgatggatgagccttctatgggactttctccaatctttgtaaatgagatttttgatattatccaggcagtaagtgagagtggaacaacagtacttcttgtagaacagaatgcaaagaaagctctttctatcgcggatcgcgcgtatgttcttgagactggtaagatcacaatgtcaggaaatgcaaaagacctgctggaagatgaagcagttaagaaagcgtatttaggagaataggaggcgattcaggtgagcagcaatattgtaattacaatggcaagacagtatggaagcggtggtaagacaatcggagctatgcttgcaaaagagcttggaatcaactgttatagcagagaaatcctgcgtatggcatccgaggaaagcggaattaacgagagactcttcggcatgagtgatgagaagatgaagggagccggctggttcaagatcctcagtcgtccatacgacggagaacttcttccgccggaagataaagacttcgtttcagaagaaaatatctttaactatcaggcaaagatcatcaaagatctggctgagaaagaatcctgtgtaatcgttggaagatgtgcagattatgttctgaaagacaatccaaatgttgtcagtgtgtttgttcatgcagatgagaaattctgtcttgatcgtgcgatggagcgtaacagtatgacagaaaaagaaatgaaaaaatacatcgagaagacggataaatttcgcggtgatttctatcgttaccatacaggacacgagtgggcagatgcaagaaattatgatttgtgcctgaacagtggaaagcttggattccagaaatgcgtggaagagatcaaagcatatatcaagatcagatttgatctgtaaatgaaagagaaagcagacaaaaaaaacaagcctgcaagaagaaagagatacggttgcgtatctctttcttactatctgaaacgtgttgcatgcagcgacatcgtttcatctatctgaaaagcgctgcatataaggcggtatcgttccatctatctgaaaagcgctatataccatgcgacatcgttctacaaaatgtgaactgatatcatgctatactgtgacagaaataaaataagtgtaactgttcagagccaacctccaaaatgctacgcatttcgtcggtgtggcgtatccgccaaataaaatttcaaaaacagttttaaaaatgcaagcattttatacctgtttttgaaattttgcttggctctgaacagttacaaataagttattcaaattacagttagaaaagaggtaaagttgatgtcaggaaaaaaagaaaagaagcattttatagtaggaattataatggttgcaattatcgtcgcagcaacagcaacaatgatctactgttacataaaccgttttgatccgcaggaatatgtacaggcatttttagatgtatcttataagcagaaaacagaatcctatataaaacagaccggcatttccgagaaagaagcaaaacaggttttcgaagataatcttgcttatacaatggaaaaatttccggagcatgtaatgacagatgagatgacagaagaatatagagaactgtttgcagatcttgcaaagaagacatcttatactgtaggagaaacaaccagggaagaaaatggaacttatcaggttgctcttacagtgaaaccaatcacattgctgaaggatacttatgctgaatttcaggagaaggcgcaggaatacgccacaaaagtttcaaatgatgtgatgaacggacaggctatgccagaagaaacacagatgcagacagaaatttatcagatctattatgaggttttaagtcaggcggcagaaaaagggctgaagtacggaaaaccaaataaaattgttcttcatgtagaaaaagataaagagggaaaatatgaaatcagaaaagcagacctgcaaaatctggatcacctgctgattgaatctgtcggagaagaacaggatgaagaaaatagttaaacaagaggaaaaaagcgaaaagagagaagagtggaagaattggaaagaaaaacagaagagaaaatgattcaaaagaaagaattaagaagaaaaataaaagaaaaactttcttttacaacagaaaaatacagaaaagaagcagacagaaagattacagaaagtgttttggaactgaatgaatacaagagcgcagactgtgtgttctgttatgtgagcacagagaaagaaatagatacattttctatattgcaagatattcttcaatcaggaaagcatcttggagtgccaaagtgtacgggaaaaggaattatgaacgtatatgagatccactcattacaagagctgtatccgggtgcatatggaatccttgaaccaaaagaagacccggaaagattgattcagccggaagcaattgattttgcttttattccatgtatcagctgcgatagaagcggaagacgccttggtcacggaggtggatattacgacagatatctggaaaagacgcattgcgtgaaagcagcactttgcagggaggaactgcttgtagacgaaattccggtggaggaacatgatctgcggatggattttgtgatttctgaaaaaggttgttataagatgtaaatagtaagggcagatttaactcgtatgagtcagatctgcccttgaaaattatttaatcgttttcatttctgtaattggccagtaacgaaagactgctttcccaagaatcttatctttggatacatatggattaatccagtagcgggaatctttcgaatcatttctattatctcccatcacaaaatagcatccttccggtacggtataaggaccataatttccgaccatgtattctttcgtctctacatcttcgagcggttcagaagagccatcaatgtagatgtgaccgtcacggatctccacggtttcaccaggaagtccgatgatacgcttgataaaaagctggctttcatcatcaggatacttaaaaatgattatatcataacgctcaggatccttggttaaataagaaagccggttaccaaccacacgatctccggtcatgatggtgttttccattgaaccggatgggatctgtgcattgacgattagaaaattatcaacaaataaagcaataataaaagccactaaaatagcaattagccattgaataagttctgatgtagtagaatttcttctttttgcagcctcccgtcttagggaagccttttttctgttatttctttttgaggcaactttttcagcagcaactttttcagcagcaactttttcagcagcagctttttcagcagcagcttttcttgcagcagctcttttcgcaccttttttatgtttagacttcatatgagttccccatttctgaaatttatactcttgttgatcttattatctagatagatatttcgcaatcaataacgtaatcataacatagatgagacaatgtggcaaataaagggaaatgaaaattttataaaatcagatcatgacgataaatgtgtccaaaacttcataaaagaagtataaacaattctaaaataagcggtaaatgcactgacaaaaagaaaatcatctgataaaatacagccatgtcagaaaagaacagtatgacatagagatgatggggaaatacagatcatctgcttatgataagagacctgaacaggaggtaaaacagtatgacaatggaacagtattatagatggatcaatacaaaagcagggaagaagatcaaagattttatggatcgtctgatcccgggactgatgccagaaccagtaccggtcagagtgccggttagacaggaagatagatataatagaagatgatgaaataaaaagctttcggttcaaatgaaaaaatccgaaagctttttatattactacttcatgttactggtatagtaagtttgaagagacttcttaataaccggatgctagtacagcgttttcaaaataactgcctcatacacttgcctgcgaatccgattgctcagttgaaaaagcctcgacgtagcccgctacgcctacgttttttcagctgaacactcgaatccgcattctgcgtgaatgagacagttatttgtgaaacgctgtactagttacagaagcaagccgacaggaaatgtagctgagcgaagtgacttgactgagtaaatcgaaatggaaatatgtctgatggtgtgatatgatttgaatggcaaaagatattttaaggaacagacatgctagcgttaagtttgctaaggagaataatatggaatggtttggaattgtagcattgttgctgttactttgttattcggcgtaagatgaggcagttttattgcacttttccaattcgagacacactgtgtcctgaattgagctggtcacattatcgtgtcttgatgcgtataaatgatgaacaggcaagaagattttatatggaagaatgtgcaaaagcagcatggagtgttcgtcaactggaacatttgaaagaatttcacaaaaaagaataaaaacgaaaatacaaagcggaagttatagtaaaggagatttacaatggagttttggatttttatgttgattatggatttgcttcttccatttacgatgattggttttggaagatattttatgaaaaaggctccaaaggaaataaattcagtatttggatatcggacttcgatgtctatgaagaataaagacacatgggaatttgctcataaatattgcggtaaagtctggtatgtctgtggaatggttatgttgccaataacagtaatattcatgcttttagtaattggaaaaagtgaagattgtgttgggagtatgggaggaattatttgtggtgttcaacttattcctttaattgggtctattctcccaacagaaatagcattaaaaaagaattttgataagaatggaacaagacgataaagtttggagaattgagaaaattggtgtatcaagacaagccattacaaagtgggaaaatggaacaggaatatcggatattgcaaatctgatggcaatagcagatctcctccaaatatcagtagatgaattactttcgaatgagaaatcagagaaaaagcagtctaattacatctatgaaagtcgtactgaatacgatattgatggtaagaagaattttgatatcaagcttggtggagcatatgctgtagatttaaaggcatatcatggagaaaaaattgaagtcgcaatgttttcaaatgtctataagaatcttctggcagattataaagtaaagattgatgatataaaaaaccgaatcgatattgatcttaacagatttaatgaagccagtgaagcagatgcaaaggagagtttggtcattactatttttattccagtaaaatatattggaaaaatcgaattatcagttaatgcagggacactgaatattactgatatagaaaatgaacatattgaggtaaatggcaaaattagcgaagttactcttcggggaaataaaagtgaaattgagatagattcaaatcttgatatgcagatcagtgttttatcacatgagggtgtgcttgagattaatcagttgtcagcaacatcgagacttacaattcctgcagattatagatttagaagcacaaaaaagggaatagcaactcatatttattatgagagacagggcaaaaaggttgatgacttttcagatgccgaagcagacaattacattgagctcaatggtataaagagtgagcttgtgattgtagaggctgaggtgtagtcatggaaaagtatatatatcgaccggtcagattctatttgattacatttgcctgcacttggttctggtggctatttgcaattttacttaatgaagggacggggctttatcttggaatgtttcttggcttggtttcacctgccgtggttgccgtaataactgtatttacgtctaagaataaagcactcattaatgactttaagaagaagctgattgggttttatagaataaaacctaaatatatattaattgcagtgctgatatttgctgtgatagtgacagcttcaatcggtacatcagtattatttggcggcagtataaatcagttttcatttacagaagacttttcattttctataggtggtacgtctgcatttcttacaattttgttggcatcctgcatagaggagttaggttggagaggttatggagaggatgctgttggtgcatacaacagctggtttaaggagtctatcatctttggatgtatctggtctttgtggcatgtgccattattctggatacctggaacgtaccagtatggacttaaagagatgggaatcatgtatgtgattaactttcttcttagcgtgataccacttgatttccttcagacatgggtatatgtaaagaataacagaagtatgcttgcaacaattatttttcatttgtttataaatattatgcaggaaaagataaacatgactcctgaaacaaaatgtatacaaactatttttgttgttattgcggcaattataattgttgttataaatagagaaatgttctttgaaacaaagcatgtgggtaatttacttgaagagtaaattatgaatcgagagataaattgaactttatcaatgtaaagaaatcgacaattcgggagttagcgatttctttttccggtattctctgtcccacggatttcctcatgatagaaataatctacgatcaccggatgcccctgcgggactctgccatatggcatttcattatccacaaaggcacaatcatacttcttagccattttctcagcttttacttcaagtgcttcaaagtagctgcggttatgcttgttatagatctcgtcgtaaagtggtacaagatcaggatattttccggcgatataatccataattgtctttttgaaaccgcctcgaagattgagattttcgagccagaacagatcgcactgatcctttacccgctcaaagattgcttcaaaattcgtgataccggggaataccggggatacgaaacagactgtacggatacctgcctcatatacctgcttcatagcagcgatacggtgctcaatgctcgaagcagaatccatatcgttcttgaaattttcatctagtgtgttgatcgaccatgaaacggttacacgtccaagcttcttcagcagatcaatatcccgtaccacaagatccgactttgtgcagatcagaatatctgcgtcactgccgatcagctgctccagaagttttctggtattcccgaattgctcctcctgtggattgtagccatctgtcacagaaccgatgaccacccgctgtccggcatatttcttcggatttttaatttccggccaatgcttcacatcaaggaaagtgccccactcctccttgtgcccggtaaagcgcttcataaaagaagcatagcaatacttgcaggcatgtgtacagcccacatagggattgaccgagtaaccgcctaccggcagactagacttagtcatgatgttctttgtttccacctcacgaatgaggattccatttattacttcttccatgatttctgtacctctaacactttattaaattcttccggcatttcctgaatcatattttcgtcccctatgatagggacaaggtcttccttcataaacaccggaatgccgagcttatgtgcctggtccgtcagagaccaggcccattccggctccgtatgaatcttcctgctctgagctccggtcatggtgccgacaacgatccaattgattccggaaaggtcaactgtgccgggatcatcgaataacggctcaaaggtaacatggtaatgttttgctctgacgtttttccgaagggcgtcgatacgccacagttctgttttcctcgtcaccgtaacgccaaaccatgcgttttccagatcggtatcaaaatccagcaaatcaggtcgcttggtaaggaacaggaactgatgctgtggattttcacgaatctttgcaaatacctcgtctctccattccggcttccatccagagagatcgctcatgccggtaagaagaaagttctgcggacgtttcttttccatcatcttgagcttacccggaaagaattcagggtcagcgaaatcatcaatcatatgccagcgtttcacgttgttgcgggcatagcaatatgtacaccccactgtgcagccaatgacgatattcatgttctgaatctgatctttgatacaaatactcatgacttctgccactcctcaagattctttctgatgcggtcgaggcattcctcaaaccggataatttcttcctctgaaaaacctttgtagtaaatactgcccatctcatcagatacagaatcgtactcgccctttaaggcatgtgctttctcagtcagaaacaggagcgttttccttttgtccgtttcagactgaacacggcttatcagcccttgattttccattctttccagcatcgtagtaagagatgttatcgctaatccgcatttagtcgaaagtgacctgattgaaataccatccttctgccacagcacataaagaatacgcccctgggctccattaaacgcatcaatattcttttcactgagaatcttctcgaaaatccggtctccaagctgttttattttggtaacaagaaatcctccattcatttccatacaaaagctcctatatagtagtttattaaaaataatactatataggagctttattgtaaacagtttatatgtcttaataggtaaattccgtttttttcaattctccaaactggaaattgatccttttgaatggaattttgtgtcaagaacgctttgaagcccgtcgccaagaggatttgaacctccgacccttcgcttaggagctcgagataccactgtaaatacatacaatgattagtcaacctaagtcaaggaaatccttggttttcctaactattctgttactccctgtcaaaataagaaaacctgttttcatctctgtaaagcatctttcggtgctcgtccggtgctcggagcacccggaggatataaccattccgttccatcgagttcactcagttggccaccattacgattcagccatacatcatttttgctcatactattttctccatattatttttcaaactctggtttccagtttgcaaactgtacaagctgttcatccgtgcgggataatatctttcattcttgtccagctttgcaatctgttccatttcttcatctgttaatgcaaaatcaaagatatccatattgtccttaatgtgttctgcatttttacttccaggaattacaacaaatcccatctgagtatgccaacggagaataacctgtgcaggtgtttttccatattttttgccaagtcctgcaaataccaactcattcattaatgctgtatctccatgtcccagcggataccagctcataagcttaattccatatttgtctaaagttacacgaagttctttctgtgtgaaatatggatgtgcttccacctgaataaactgaggtacaatttcccactttgtttccaactcttccatatattttccttcaaaattcgagataccaatggattttgctttgccctctctatacgctttttcaagcattctgtatccggcaagccagttgcctgcaggctggtgtatataaagtaaatccacataatcaacaccaagtctttctagagtttcttctacagtattctcattttcatattcactagcccatatttttgttgatagaaatatattttttctgtcaattccactatccttgattgctcttccaactgcacgctcatttacataagcatttgctgtatcaattagggaatatcccatttttaatgcctctaatgtacttgtgtaggcatcctctggtgataacataaaagttcctagtccaagcattggacattccaaattgttattcaacttcatattttccacctttttaatcctcctgaaatttttctttatcaagcatttttattacttttgccggatttccaactgctactgcataatccggtacatcctttgtcactacagatccagctcccacaattgcgtgtcttccgatacatactcccggaagtatcgtagctccagctcctacccaggcatattctcttatcagaacaggcttacaagtcagagtacacaaatcatatggatcatgattattggaaataagctgtacatttgcagcaatcatagcattgtcttcaatcgttattccacctcttgccattgcaagaagattagaattgataaatacattcctgccaatctttacgcttccaacacacgctccattaagcggtggtgatatcatactcccatctcctaggttatttccaaacaattcctttaataaatgattatattcatcagtaaaaggcattgtatgattaatctgaaataatatttttgtctgacgttgcccttctatactttcttttattgacgcagttcttacatcaacacgtatttccttgcattccatttttctaacctctatttctgtatccatctttcaagtacatctttcgcttgatctacgctgcttccatgtatcgcaatgcctttctcaatcactgcaccttttgcactttttttaatatcactctccgtatttgacaatccgcttccttcatgcatacagaatggatgaattttctttcctgtaaaatcataactttccagaaaagtatatacagccattggcatggttccccagtaattcgggtatccaagataaatctcgtcatattgatctatgtcctgtggcagatttagtatctctggtcgttttcctgtctgtttatcctcttttgcatgtgcaatgcaggtattgtagaatctcccgccctaaatagcctttgatattcaatcagactttctatgggaagtcctgcatttctcatacatactgcaagctcaacccatctaagatcttcaggctgatcctccctacaggacttcggagatctgaagctgtgtctatacagatctcggagcttcatataaaagagcgtacaatcgaaataaggaatgccaagggacacaaagaacggatcatcagtatttcggaggatatggcttttctattagagaactattgccggttcataaaaagcatggtttctgtacaggataaatggcttttcccaacggtcaatccagcattccatctttcttctggtgcacttggagatagatttaatcggttttggaatccctggattttatccgtcagaaagattcgatttctgcgcttgtactgccggaggtgaggatacgatgacatcgctattaagtaaaaaactcttcttttcaatgacgtatgatttcctgacagtatatattcctcaggacagtgccagttccaaaacagtgaaaacctaccgagacggacttacaatcttcagaaggtatgttgctgaagtaaaaggcttttctatacgatctttttcttttagtcaatgcacctttgagtgctgtcatgtacagtatcgtagaaaccgcaaaagccaacaatctgaatgtgttccagtatctctacacagtactactttatatgccggactacaaaaatgagcccgcaggtatagaaaagctgttaccgtggagcaactttataaaggaacgctgctgcagattgattgatgttgaaaatcaaacaccagaaccccatgaaccactgcctatttaaggagaaggataccaaggaggcagtaggcaatacggtggattattcatcgtttacggtggttgtttgctcagttttttggaatatagatgattttgtcacaggcgtaaagttcttctccctcgctgtttcgcatttcatatccgatatatttacaattcccatccaactgactataataaagaatgtccgtttgcctgcaaaggcgcggaaccatatccatctgcatcagggcgatataacagaaaaatgaacttaaaagaatggaagaaagaacaatggatgtaattgaaaaatttggaaatagggtgagcagccaggcgcttaaggatccggaaaaagcgcgtcggctgcttcttgcgggataccgcctgcaggaaaagaagcttcagtttttgccggatcgagggctgccgtcgtcgggacagtatgtggcgcgggtggttatgaaaaatatcattcagtcgctgtcggaaccggagaatgcggcgatggtcagcatatttgtgccgggagagctggtgacggcggcagggctgacgccgtactcagtggaggcgatgtcctgttttatggcgggaacgaagtgtgagcagacgtttcttcggaaaacggaggaagaaggatttccggagacgatgtgttcgtaccacagggtgtttctgggggcggcgctgacggggattctgccaaaaccgaactgcatgatttatacgaaccttgcgtgtgatggaaatatgatgacgtttccgtatttaaaggataaatttgaatgtccaggcttttatattgatgttccgtatgagaaaaaccgggaatcggttctgtatgtggcggatcagctgcggaaattgaaacggtttctggaggagacgacggacagacggatttcggaggaaacagtgcggagtgcggtagataacagccggaaagcggcagcgaattataaaaaacagcttgccctgcggtgtgcgcatgacccggtgacctctctgacgaatgaattgtatgcgctttttatgtgccatctgatggctggctcagagacggcggttacctatacggaaaaacttctgcgcgatgtgcggatgtcaccgaggggagatggtctttcggtaatctggatgcacatcatgccatttttacaggagccggttaaggatacttttaattatagtaagaaaatgcacatccgcgcttgtgatttcatcgcagatggttttcaggagatgcaggcggaagacccgtatgaggcgatggcagagaaaatggtctactgcatttacaatggcagtgtgaaacagagaattgaggaagcggaacggcttgccagaatcacggaatcggatggtgctgttttatttgcccactggggctgtaagggaacgatcggtgcatccagcctgattaagcagtccttagaaaagacaggacttccgacgatgattctcgacggtgacggctgcaaccccgccaataccagcgacggtcaggtatcgacgcggcttcaggcgtttgtggaaatgctggaaaagggcaaggaggagaaacacgtatgatttattacgtctgtaagtacaccccaatcgagctgttccgggggtttggagaagaatgttctgttttggaggaaatgccggaaaatttcgaacagtcggatcaaattgcacatgcaaatctgtgcggctttggaaaatcggtcattcaggcagtgctggaaggaaaggttgaacagctggtgctggtaaactgctgcgattcgatgcggcgcgtttacgatatcgtggagagcacgggaaaatgtaagtttttatatatgctggatctgccgcatgatgataatgaatgtgaaaaagtgaaatttgcgggcacgatccggaggcttaaaaaggcatatgaggcatattccgggaaagtgtttgataaacgcgcttttatcaagtcctttattacgccggaaatgaacacggagccgtacattggtgtgctgggcgtgcgggtcagcggcattctggaggatatgatccgagacaatatccagatggatgtggaaaatctgacctgtacgggtggtcggaaactgtcggtcgtacaggatgaaatgtggaatatggaggaagaggagctgtttctttcttacgcggacgtcctgctgggacagatgccgtgtttccgcatgaaccgttcgatccgcagaaaccgtctgtatctggatccgaatttaaagggaattatttatcacacgatcaagttctgtgattattatggatttgagtatgcgagtatcaagcgggatatcaaggttccgctccttaagattgagactgattttacgacccagagcgcggggcagcttttgacgcgcattcaggcatttgaggagacgatcgagggatcagaggatatggatccgggaaaaggtatcagtgaggaggtaagaaagaagatggagtcgggcattttttatgtagcgggaatcgacagcggttcgacaagtactgatgtggtcatactggatcaggatggaaaaattaaatcgacgatgattattccgaccggcggcggtgcgatgatgagcgccgagaagagtctggatctggcgattgagaaagcgggaattaagaaagaggagatcgtgcggatcgatacgaccggatatggacgatcctacattgacagcggggatgacagcatcacggagattacctgccatgccaagggcgcaaattatctgaatccgaatgtccgcactatcatcgacattggcgggcaggatatcaaggcgatcagcatcgacgggcagggagccgtgaaaaatttcctgatgaatgacaaatgtgccgccggaacgggacgttttctggaaatgatggcgaaaacgctgggactttccctggaggaaatgagtgtgaaagggctggaatggaagcataatatcgtgatttccagcatgtgtacggtgtttgcagagtcggaggtcgtgtcgctggtggcacagaataaggatgtggcagatattatccacggtttaaatgtgtcagttgcctcaaaagtcggcgcgttggcagcccgccttggaaaggatcatccaggcgaatatatgatgaccggcggtgtggcgaagaaccggggtatcatccaggcattggaagagaagcttggtgctaaactttatatctgtgatgaggcgcagctctgcggtgcgctgggagcggcgctatttgcttatgagaaatgtaaaggcagtgcggaggaaacgcgatgaagcggcagggttaaaacacttgtatcgatattttcgtcagatattcactgggagaggctgtggccaattcgtcgatcacagcctctttataagagtatttgccggttttaaacttgtgttcatcggtccaatcaaagagtttttcgtaggtggctttcgagtcatagtaatttcccattaagtaagcaagtaccttgccagcccaaagtgctgcaacatggttttgcaagcaatccgcaacgttcgctcctccagtattcatctgtaatctccataccaccatcttctcatctccccgctttcttctttagtgcttatccaccttccgcttcgggaaccatccttttgccactcttttttcctgttctttcaattccttaatgctccaaaagcaactgacgcccaaaacccccagggaaaccgaccaaagtattgcaatatagaactacaaccttcctcttccatatttttttaatatctgacacatttttacggattgcattttttacacggatcataacctgcaacaatcagcgcatccctactctctgatgaggattttttattgctctccttcatctgtttgaccgatgaacaggacggccgatgaaatttctttgtattggtattgaggatataggattccgtgctggtctgctgagaagctgcctgcgtaacagcctatgtggcctgctctgttactgccatcttgtttgttccagaaaccgagctgtcacccgtcgcataattgatgttaattcccggctgaacattataaacgtaaacgcagcacaaaataccttcgcctttgtcttctacggattccgcttccattagtacgccggatgctacgagattactgccttcaaaaaccggagtcacccgatactgcacatgatttccagtttcttttacatagtccgctgccatattctcaagcggcagcattccctgaacattcagatatctggtcccagtgattaagttcttctcattcgcattttctgcagtgagctgaaaccgatcaaatggcagcgattatataaatatttgccatccacattgtcatatttgatcgtatgccaaccagatggctttacctgcccaatagagccgcgctcttctgtcggcatcagatcttttccaactgatgcatggttcagaacgagggcctggattatttcggactctgcagctctttgaatgcgactccggaactcatgagctttaaactatacagcctgacaaaacgaggccaggcttatcatatgccgatggagatacagagtgattttctggcaaaataataaaggataagcgcattctgcaataagaaaactatagatttatctcactgaaaggaggaacatttatgtcaagacatcatatagaaaaggtaacttgtccttcctgccatcatgagggggattttgagctctgggacagtattaatactgcactggatcctgaaatgaaagagaaggtacttaatcaatctattttcctttatacctgcccgagctgtggagagaccttttgtttaaactactccacactctatcaccagatggaagatcttgtcatgatttatctggttcctgaatcagaagtaaagaagacatatgaaatgttttatggtgaaaatgctttgtttgattttcgtattgaaaaatatttagcccgaatcgtaacgtcacccaatcaactcgttgaaaagatacagatctttgatgctggtaaagatgacagaataatagaacttgttaaattacttgcgacagattctatcctcaaaaatgatcctaataaagaatttgatgaattgtgctttgctgtcgatgacgacggaacaaatattcttgtaatcattaataagggtgagatcactggtgcagttgacattgacaatatgtatgaatttgcttcttcacactgcaatgatttcaaagatctccgcgatgatgaggatattgttatcaatcgggagtggattcttaacaaacttgccgaagcagaaaacgaatagtatatttggtggctacaccccccaagcccctgtggaatcaataacgccggtactggatatcaaaatcccgcaccggcgttattgattgtaattatctcttttttctaatcatagaatgactgattatcagctctacacatcttgaagttatggattttcttgtagcgacaaccaacaaattataattcctttccaagttcatatgctttcttcatcacatccacatggcttgcagctgtatttgcgtcatcaattccaccgccgcttacaatgccttttaaggaagccttttcaaaacagtctacccatccttgcagaccattgtaggctttttcaaatgcactttcatcattctcagcggcagttgcaatcatataaatatctctgaatgaataatctgtcgaatataaaggattcaatctatcaagaagtgttttcatctggccacacatctcatagtaataaattggtgttgcatagacaatgacctccgcatcctttacttttgccataatatctgcaacatcatccttcagtacacacatcccattcctctgacaggatagacaaccgatacaatattttatatcttttcctttcaaagaaagaagttccacatcatgcccggcttcttttgctccctttgcacactcatttgcaagtatatcagaattgctgcctcctcgaagacttgtcgatatgatcaatactttttttgccatgattaaatttctcctttttcagtgtcttttttaaccttccgtataactttcgcaggcactcctgccgcaatcatattggccggaacatcttttgttacaactgcaccggctgcaatgaccgaaccttcaccaatcgtaacccccggaagaaccgttacatttgctccaagccacacttttttttcgatgtgaatcggctgaaatatcatacctgctcttttctcgggatcttccatatgattgatcgttgccaatactgcattatgtccaatcaggactccatcctctatataaataccaccctgatcctgaaacttacatcctgcattaataaaaacatttttacctatatggatatttcgtccgcagtctgtataaaacggaggaaacattccaaaactttcatctattttttgtccggtaagttccgacataagctgtataatttcttcttttgtatgatatttgttattcagctccatcgttatctttaatgccctttgagacagctcatgcataaccaaatgttcttcacttccaccatctacgatatatccgggcttcatattactcaaatattcttcacacgtcataattaaccaactccgttttctttaaaaaatttctgaattttgtcaaatggaatcacatccggattatcgtatagatctgtatgaacagctcccggaattgtcagcagttctttattggatgtgtacttgctgttcttaatcatattttcataagcatcttttccaaaataatagctgtgtgctttttctccatgaacgatgaggactgcacttcttatttcattactgtactttaatattggctgattcataaatgacatacatccaatactgttccagccatcatttgaattcaggctccttttatgataacatctgcctttataatactcactgtaatcttttacgaagaaaggtgcatcttccggaaccggaaggggaacacaaccaccgcctcttgaatattcgcctttacggtattcttctgtcctgagggtattcagcgactgtttctttgcataacgtgcttcttcactgtcctcagaatcaaagtatccattcgcatttactcttgtcatatcatacatggtagaagcaacggttgcttttattcttgtatccaacgcagctgcgttaagagccattccaccccagccgcagattccaatgattcctattttatccggatccacatcttcccgaacagaaaggaaatcaacagcagccataaaatcttctgtattaatatctggagaagccataaatcttggatagcctccactttcccccgtaaaagaagggtcaaatgcaattgttaaatatcctctttcagccattgtctgtgcatataatccggaacactgttctttgactgccccaaatggtccgcttacggcaatcgcaggatatttcccagatgcattttttggcttatacagatctgcagcaagtgtgattccataacgatttataaatgtcactttcgtgtggtctactttttcactctgtggaaaagttttatcccattcagatactagttttaattcttctgttttcaacataaatataacctccatatgcaaaatttcttgtaattacactaacaatagtatatgatataaatatcctacaacctaaagttaactttaggtcaagcataaatttgaaagaaggttttttatgtatacaatcggtcaggtctctgcaatgtttaatcttcctgtttctacattaaggtattatgacaaggaaggctttttccctaatctggaacgcaagggaaatatccgttatttcagcgataatgaattagaagcacttcgtatcattgaatgtctgaagaaatccggtcttgagataaaagatataaagcaattttttatctgggtatctgaaggcagctccagctatgaaaaaaggaaagaattatttgaaaccagaaaatcagctgttgaaactgaaattcaggaacttcaaaaaactctctccctcttaaaattcaagtgctggtattacgaaacagcaataaaagatggtaacgaagatgctataaatgccatgttgcctgacaaacttccaaaaaatatacagaaactatatgataaagggcatgactgatttttgctttctccatcaaactggaatttatataattattcctctaactttccccattttataggctttcccgcctgtccattagtgaaatgatatgtagtttcccttatttttgcccttatgagataatcacaagggaaataagggaaattttttagtcattgcccaccactttatcaagaagccgaactgattttcgtttcgcatctcttgtggagtgagcatagacgttcattgtggtactgacatctgagtgtcccaacaattcctgcacatcttttggggcagctccatttgctaaaaggttgcttgtataggtgtgacgtaactggtggaaatgaaagccttcaaatccctctaatgtttttgccacctttctgcaaacagtccccaaagtagttggaagttccaaacaaccatccggtcttaaacagacgaaagaaatttctttataatctgtcgggacttcctctgttctgtctaaacaataatattcatagtacactctgtttttctctttgaccgctttgtagtagttcgtgtgataaagttctccgtactgcattcgattttttaactgctctttccgggcattacggaaaatctctaccagcgtatctccaaaatcaacaatcctcacttttttccgcttggttggtccgatgatatatttgcgctttgagccatcgtatcggatgctacgtcttatggtaaggcattgttcttccagatttacgtcctgccacgccaaaccgcaggcttctccaatacgaagcccggcataataggctatctggattggaagtattgcggctgggttcttttttttcagataagcaagcaatctttcataatcttctcgtgaaattggttggatatttccgtccatgtcctcgtctgaaaacaaatcaacttcatccgtctgataccgcagtttaatatactgcatgggattaaacgtaatatactgttttggaaatactgcaaagcggaaggactgctgcatgactgcggaaaaagaatggatgtaatctttgctgtaaccctttctctcttttccgtcgggatgaactcccccgaaggaaagcaaatcaaaaaaggattgcaaatgctcagaggttacattttttaatttccgttctgccagcggatgtttcttaatatttcggattgttccgaggtaattctccacagtaccattgctgagcgtacctgtttttaattcctcctctgcccacacatccaaaagttgtccgactgtgagattttccgctttggcaacaaatttctttttctcataatcatccattgcctgacggagcagtttttcagtttcacttttgctttctgttccaacgcattctttctgaacaagattgccgcttgcgtcctctacatagaagcggtagtaccatttctttcctttttttcttacagatccttttgccataatcgtatgtctcctttcgatattagacaatcggaactgatgaaatgcttcgtgcgtgtaagtatatcataactccggctgtcttactataccgattcggaatcttcgtataagacttctgataaaagatttgcaagcctttgctctgctgtttttggtttcttggaatagagccttacgatgtctgccatctcattaaaagcattgatggtgtgagtgatttcccttaagaacataatctcattatattcatcattcgattcaaaccctattgttttggcaatatccgtctgaccatcatttcccttgaagtttttgcaggcgaactgaaaggaatccaaaaacagaccatattgttttaacatcagcagtaataaatcttttgaaaaagcatcttcttctttggtaagggcaagtggtaactgttccagaatatctcccatcgcatcacgaatctgtaattctctcttatccgtaatatcggtttcatattcatctgtttcccctttgagccattccacagatacatggagtgcttccgaaagaccttccaacaccatttttttcgtattgtcaatcgaaccattctcataacgcaggattgtagaagcggtaacacccatcttttctgcgacataaggctgtgtcagattcaattccagacggcgctgttttactctgctccctatcagcttgcgtaattctttatctttcatgctgactgcctcctttttcggtatgtatgaattatagcattgtttttctaaaattgcaatatgcaatataaagtttatttttaacatttcgtaacgcttgacaaaaagatgtgaaaaggatatacttacatcacaagaattgcataatgcaatttataaggaggtgattatatgacgcaaagaaaaattgcattatccatcgaagaagctgctgactatacgggaatcggcagaaacaccttaagacagcttgtagaatggaagaaacttccagtattaaaggttggtcgcaaagtcctgattaaaaccgatattctggaaatgtttatggaagctaatgaaggtcgtgatttgagggatagagtaaatgtaaaagctgtaacaagaactgtggcaaattaaaaaggcggcttccaaagaaaccgccaaaggttctatcagaccaaagccatgatatacctacacgcaagaagattataccatgtgcttcttctgatacgcaaccgagaacttatgtttgcaaaagaaaggagaatgtaataatggcaaaatcaacaaaaagttatgaagaacgaatgcttgaaatggaaaaaaaggaacaggaaagccttgaaaaagcaaaacgatatgcagcacagaagaaagaacttctgaaacgaaagaaaaccgaggaaagtaaaaaacgaacccataggctctgtcagattggcggtgcggtggaatccgttcttggtgctcctattgaggaagaagacatcccaaagctgattgtttttctgaaaaggcaggaagccaatgggagatttttctcaaaagcaatgcagaaagaaaccaataccgatatggaggaagtgtaatggcagaggggatgagtttttcattcccttcattgctttttcatgaagggcgcatttatggacaaccagaggtcgtcccaataagtttgccacaagtggcaaccggtctgcgctcacgcttgccgggctcgttccgtcggcggggctttcagccagacctgctcatgccgcaggaggcactcttcgccagagaggcgcattccatgcaggctgctatgcgcagggcactcttacgcagagggcgttccggcaatgctgctttttctaaaactgaaagcaatgttgccggaaatctatgccggatacgtcagaaaggaggaatccagacatggcgatttttcattacacaatcaaaatagtcggacgaagtaaagggaaatctgttatctccgcttccgcatatctcaatggggatgtgatgaaaaacgaggaaacagggagaatcagttattacacttctaaaaaagaagtggtcaacacccggctgatgatgtgcgaaaacgcacctcctgaatggcagatagtaccagaagaaaatataaaacgctttcaaaaatctgtccgatacaaaaggtcagaagataaagaagctgctttaaaaaaattcaaaatcacatttcagaaacagaggttatggaacgaggtattgaagattgaaaaaaatgcagatgcccaacttggcaggtcatttgaatttgccctccccaaagaatggagcagacaggaacaaattcaatatacaaccgactatatccaaaaaacttttgtagatagaggaatgtgcgctgattggagtatccacgacaaaggggatggcaacccccatgtccatctgcttctaactatgcgtccttttaacccggatcattcttggggaaagaaagaagtcaaggattgggattttgtcagagataaaaacggaaatatcgtgattgatgaatcccatccgaactggtggcaggataagaaaaaccctgaccgtcatggaatccgtatccctgtattagacgaaaacggaattcagaagattggagcaagaaaccgcctgcaatggaaacgggtgctgaccgatgctactggatggaacaatccaaaaaattgtgaactgtggcggagtgaatgggcaaaggtatgtaatgaacatctgcctttgcataatcaagttgatcatcgttcttatgaaaagcagggaaaactccagattcctaccatccatgaaggagctgacgcaagaaagattgaacaaaagttttttgccgggcaggaaataaaaggctcgtggaaagtagcggaaaatcaaatcataaaacaacaaaacacgttattgcaaaagatactaaacacctttgggaaagtatcgggtgcattatcattatggaaggagcgattaaatgacattagaagaaagccgggaaattatacccttaatggaatccatgattggtcaaatcgaagaacagcagaacctaatggcagaaatgattctggaaatgcagaaccgggacactcaactctctcttatgcaggaacagaatcagaaattacaaaaattaaacaacgagttatccgagctgctcaacattttgccaaataccgaggaactgctttccaagatggaagaacagaaaacgaagatagagcttttggaaaacgaaaatcagcaatggcagaaattggcacagaagctgaacagcgaaaaccgtttattactgaaacagaacaccgaattgctgaactggaacagcagatagagaaaggacgtgatatagatgaacgaatccagagaatcaaagaacgccgaacagttggaagaacttctgctcttgaccgaggagatacaggcagaactggaacagaaagaccagcttatcgtggaactgaagacgcagctcaacgaatctctgaccttgaacgagaaattaaacaaagagaacagagcattgaatattcaatcattaaagaacgacttgaagatggcagacagagcattgcggatcgagaaagaaaagctgcgaagcgcaaacgtcacgatagaggattgtcaagataaaatacgctgcttaacacaggaacgggattatgcccggacacatcagaaaatcgtagagataccggtggaaaagccggtactctatgaaaaatgtgaagcctgtgaccgggcagcctatcagaatgcaaaaacgaaatacgaaacacaaaaagagcgacttgccggacagtataaagcaaaaacggtaatgttccaaacaaccttgtttcttcttgcatggtattcgctgatatccactctttttcaggcaatacagtcagatgcgtttctttccgattgtaaatcattcttcaatgatttagcatcattcatacaaacctttgtcggatggacgattgatgccgggcattctgcggcacagattagtacaaaaattccaaatgcttttatagccggaatggtatattggttattgctaatattgattgtaggaatatgtatgtcaggaacagggatgctggcgatactgatagaaataaaggttatagaattatataagaaaaactgttgggatgttattactctactaatgatactgacaagtgttgctattgtcatttattttggagaatcaatcaaaaaagtactgtcagtaaatcttctattgcttttcgtactttcgcagggcgcatatgttggaattagatgttatcttaaagtttggttagaaaaaagaccatattagtattttcaacttactgtatagacagtaaaattactccataccagcctagtgaaaatttactgtatgaaaagaagtattacagagaaaaaaggctgtaaaaacaggaacagccagcccgaaagaatttacggactggctgtatcagcagagtaatgtaattgtggagctgaccgagatatgaaaagctttctatcatcaatttcgcattattgcaataacagattgcttcttccatgaatgaataagcaatattgtcatcaaactttcaagcataaacatagcaacagcaaaaagagtaaaagcaacgatcggaaatacaaatcccgtagacatgcctgcatttttcaaaaatataccgattgcatatccgccggggattccaacaacagcagttataagcaatgcaatcaaagtagtaaaaagaccttccatcataaatgcttgctccaactgcttatttgtcataccaatagattttagtgtgcccatttcctgtttctgtgataaaagatttgtcacagtaagattgatttgattgatgaccgcaaatatccacaagatggctgcaatcgcataagctaatgtaaaacctgcacgattgtctgattggtgttctacaataaaatcttgaatggtttgtaagcgaacatccctattgtcagaaactaataattcgagttcctgctcgatcatttcctgatattcagcttctgcttgtatttcgattgcgtatatacagtcataacctgcaagttctttgagcatattttccggcattctgaaaatatagccacccattccatcattgctggaagtgattgcaccaattttgaatgcttttgttattgttttaccactatgatttttgaaattaaaggtcacagtatccccaatttgaggtttccaatggtaaacatcataaatacgttcggggtcacttacaactaattctgtatcatcagtaatatttccagacaaaatagctgcatttagcgatgccaaatccttttcattatagccgagcagcaaggtgctatctgaaatatcattgtctgttgagtaatcaactggtaaggtagcataagtaaatatattgctaactccctccatatctccaacacgctttacataatcagaaaaatattctttctgcaagagagcatccagattttcactttcattttctaaatcaatgctgattttgaaatctccgtacttcatatcccaataacgagccatactctcggcattaaaagaactctgataacttgctgcaaggaaaaatataactccgcacagtcccaatgataaaatggtcaatagagatttttttctgtttctgaaaaagctgattttcgctaaatatacgggcgtaatacgatgtcttttgtgagtgcggtaatttacaattcccacttgatttttcagagcagaaattggagaagtattcgctgcaatttttgctggtttacgaacactaatataaacaagcagtattccaaaaaggcatgcgccacatagagaaacaataaatgcaaatactgaccagccttttgattgcagacaatagctgatgatcgttcccatgatactaccaattaaaatccccggaactgcaagcatataaccctgtttaagaactattttataaatttgctttttacttgcccctattgtccgaagctgtccgaactcagcaactttttgtccaaccgaaatatagaaaatgctgtaaattacaagtgcggcagctaaaaacaaaatggcagcaactacaccatataccgcataattactgaaggacaaagttgtatttacataatcatagtaactgctgactgtccaattattcagtccagtctcctctgaaatttgagataatatttctgttgcttcgtcttttgtaagggtatctgcattttcaagccaaacatatccattaagcaggttatttccacgtaattcccggcatttttcaagtgaaacaaaaacaggataagcggtagaagttttatcatgataaataccaacaatagtataattcttcaaagtaccatccagattcaactgaactatggcgttgatttccggagacttattttcactggcaaaaaaggcatctgtaacagcaatttcacttgctttctctggatattttccgtcaaaggcaggaatcaaactaagcatgtcatcatcataataaatcagagacagttctttagaattttctttcactgttttgatattacaggaaagtcctacactttttacttcttcgtttgctaacaacttttctttactgtcctgcgtaatgtcaaagaaaatcccttgatgtaatccttcgatttctttctgattttgataaatgatattttgcactgtgagcaacgacatcattatcatagcaacggctacaataattgccgaaaggcaaaataagtttttcttcttatcaaaacgcacactttttcgtgctaattttttaattactgcactggtatcattttcaaaaggataattcataattcccacctcctttagccaacaattttaccatcttcaatccgtacaatgcggtctgcgagttgagcgatctcgttgttgtgagtaatcattacaatggtctgattaaattctccgctggtacgcttcaaaagccctaacacatctgcactggtcttgctatcaagatttccggtcggttcatcagcaaggataatcgcaggcttcgtaattaaagctcgtgcaattgctacacgttgctgttgaccgcctgaaagattgttcggcatattttccagtttatcttctaaagccaacatatacacaacttcgtccataaatttctggtctactgtatcgccatccagttccacaggcaggacgatattttcatatacattcaaaatcggaaccagattataattttggaagataaatccgatgttacgacggcggaaaattgtcaattcatcatcattcttttttgcgagttcttctccccgtacaatcacgctgccggaagtgggggtatcaagtcctcccatcatgtgaagcaatgtagacttaccgctgccggaagttccaactacggcaacaaattctccctgttccacagtaaaatttacaccattaagggcacgagtaatatttggttctgtgccgtaatacttctttaagtcgattgtttgtaaaatgttcatattcaaatgctcctttcaaggctttctatctgttgataaagccattgtaaaccacaaatgttacacaaatgtccgagatagaaaaaatttttatcgaaaatcagggtgaaatgttacaacgctcggacatttcaaaaaaagtggttatatcttaccttacaggaagcataatagaaaattctgagccttgccccagctctgaaacgaccttgatatatcccccttgccttgttacaatctcacgagccaaatacaaacctattcctacaccctgttgatcgtgtacttcttcctcacgatagaagcgccgaaagatggcagcctgattactttctgaaatgcccttgccggtgtcggtcactttgacctctacgtacatttcccactgaaccactgatacagaaatctttccacctgacggagtgtattttactgcattgtccagcagattgaaaagggcttcgcttgtccacttgctgtcatgggagattatcaaattttccgggcaatccacggatacagcaatttcttttttctctgcggcatatacaatactgctcatagcttgtgcaagcgtatggaataagctgctgtctttcttttctaatcgtatcgctccggtttccaaccgggatgttttaaccagtgcttggaacagaaaatctagtttatcagtctgactgcgtatgccttgtaaaaagtccatccgttcttcttctgaaacaggctttgttaaaagtgtgtccgttaccatttgcaaattgctgacaggtgttttgacttgatgcgaaatatcagaaatcagcatttgaagctcctgtcgttccatgtctatcttgtgtcggtttttctgcataatctcatacaaccggattaagcggtggttgatacgggcaaaaagagtttcactatcatttgacttttgtaattcctcgtttccatcaatcatgttgtccagcgtccggcacaaattagaagtaagatgagaaaggcgttttccaaaaaacagcaccaatagccaaatccagaaaaatgcacagagtgtcaatgttccacccgctatgaaaattcgtgtatcctgcattataccgccgaaaataccagtaattaccagcatagagaaaaccatgccagcactaatcagtctacaaattttcttagcagaaaggttattcagtttcatttcttttcgcctcctgtccattgataacccataccgtaaaccgttttgatatatgtgtcgccatccgcttcaatcttactgcgaatgcggctgatagaagtagtaagggtatgttcatctacatatttttcatcaatgtcccacagcctttccaaaagttgttggcgggtaagtacctgcttcggatttttaagaaataggttcagcattttatattccatcgcagaaagcgctaatggtttcccgttcaaacttgcaaattgttccgaaaaatccagaaacaggctaccatcctcgtaaatatccttagctggtttgtgatgttccaacatagcgaacatggctttgatctttcgctgcaaagcactaatcgaaaaaggtttcgtgatataatccactgcaccagcttcatatcctcgtatctgatcgctttcctgatcgttggcagttagaaatataactactgtatcaggatgctctggcttgataagacggcataggtcataaccatttccgtctggtaaatttatatctagcaataccaaatcaaaaatgtttgtttttaatgattcagcggctgtccttgcattcagaacagaagttattgtgtaaccgtccaattccaaattataagtaagcgttttattcaaaagattatcgtcttcgacaattaaaatctgcttcatattgtcacttccttttctttttgcagatagtataacaggcaaatgtccgagaattgttacaaggacaaatatatttttcattttacagcttttttctgtgtactgcaattttataaaagaaaggacagcagtgtcaaattgctgtcctttcttttatcatagctggtagtgtataagcgtgggttcatcatatcgggtgtggtatctttaactacaggaaactccctacaacactatctcacttcttgcttaataaagttctaatgaatcttctgcatccacccacatctgtaaattgccatcaagatataatcttgcatattccaaaggctcatccacagccaatgaagtaagcgcacattctgatccatatgtggtttttaaatttttttcagcttcccagcaatcaatgcgaagcatatatccagcacttgtgtaaacatcaatactatcgtggtttatattatattctgcataaattgttctcatcgtatcttatctccattttcttttgataatcagttacagagttaaatatcgaaaacatttcaatcagttcaccatgtcgttattgttatatgttatattgtgttatgaaattttctttcccttaatttttcccatattaaggttcatgaaaagcaatgggaaaatgtaacacaagggaaagagtaagggaaagttcacttgctacaaacttagtattttcaagggtttgcgaagaatttgataatcaaatataacagttattaaatttcctaaaatatgtgaaatatcaactggaattttcttatgctcctgttctattttacaaccacagtgtggacaatattcttcactatttataggtacaacccttaatgatttgccacagaatggacagtgatttttgattacaattatgattaacctattataagttatgccacttcaatttttgcaaatatcatccaatctgcaatacatgaaattaaaataactattcctaaaaatgccggtactcctgcaaattgttctaaatgatttgaatgaattcaatattatgcttttttttccttaaatgacttcagaaagatcacccatccaaagatcagcagattcattaccagtgccacaggaatatctccccagtggatttgctgattctgaagtacatccgcagagtacgttcctgaaaaaactaccaccatattattgttcagaaaatgaataattatcggaacccagatattctgggttttcatataagtatatgccataaaaatccccagtgaaatacaggtaacaaactggcttgccagagccgccagccccatatccggcgtagtgtaatagaagaaatctattggcagatgccatacagcccacacacagcccaaaaggattacgccgccttttagtccaaatttcttctgaagaagaggctgaagataatatctccatccgtattcttctccaaagaatgccactactgaaaggaaaaagtttaccaaaacagtaaaaaatatgatccaggtagtgggatttgccattattttgccaaattcagaaagctggccgctcagagcactggcaatcacaaatctgagaagatataatccaataaacaacaggatcatacgaatagatatattccaatgttcgctgttcagtccataggctctgcgcttttctttaccggattgcagaagaagaatccagaaaataacgctgccacctattataacgtactccatgatcggtgcccactgagaatatggcatgctcatcagatctctattttggggagccagaacagaagccgccgtgcagacaaccagcaccgccgtgagagctacaaagaatatgtaaaaagccgttggaagatttttatctccttttttggtaattaaataagccatcatcacacctgctgctggatacagcatctgcgcatttggaaaagcgctgagattaagaccttttccatagccataccacatcagaagtcccattacatatgtgattccgtatgctataatcacatagatcaaaagctgttttttctctgtttgcataaatttcataattccttccttgcaacttttaatttgttactcacatgatatcatactttagacacttaggcacaggttattccccaaattgaagaaaacttaaaacattgatttactgcaaggcataacgaatcttttattaaacaagggcaagatgcgcccttgagtaactctaatttccttttggaaatcaggaaaggttgttcttaggaatatttttctttacattcattaatagtatgttatactagaataaatctgataaatttgaaacacttactatagttattagaaatggagttttctatggatttacaaatgatactatttattgctttaatcattattttttttataattccgttactagcatttattattaaatctgcagtaaagcaaggaattttggaagcttacaagattattaaaaatgataaagataaaaatattttataactctaatctaaaatttagtatgttcaataaaaatcctcttttttaaagagttggatattctttaattatttcttgttattagttgtataagacccatataaggtatctacttaatagaggaaaagagaattacagatgttttaaggaaaagtggctatttttaagaatatatcaatcaactttgttttattgtattttgatactcttgtgttaatacccggataaaaaagaaatgtcctaacagtattcttcatgtttatgtgaatatgaattaatctgctaaggcatttctttttatttttatctttaaaatatcatttaaaataatcaaatttttagcaaagtaggtctttttggtatcatatgagacgcatttgtgcaagatttcctccttcttcagatgtttcgaacatatggttgattacctttttgattacctttgctttttggaaaaaagaaaaagccttaaaacagcgattttacgcggtttctaaggctttttaatacaggggatgagagaatcgaactcccaccaaaggttttggagacccctatcataccatttgaccaatcccctattcagttgtcgcttaactcaagcgacttgttaagtataccttatggagtgatgaatgtcaagaaaaaaataaagaaaattcaagaaatgtttcaaggatggttctctaattctgaatcaaattataacgcatttatcaaagcgatgctttgggggaatgtgaaagagatgaatacttatatgaatgaagttgcactagctacattcaacagttttgatacaggaagacatccggcaggaaaaaagcagccggagcgtttttatcatggattcgttctgggacttttggtagaattaagagatcgttatgaagtaaagttcaacagagaaagcggttacgggcgatatgatgtgatgttaataccaagagaaacgctggatcaggcaattataaaaaaggaagaagcgacctcaaaatcacttcttcctttctttgttctcttacagaatttcaagatccatcattgcttttttcagaacttctttatgtgcatcttccatctctgtcagaggtgctctaagagttccaacttcttttcccatcatgttaagagcagccttaaccgggatcgggttcacttcacagaagagagcatcaaccagtggaagtgcatctaactgcatcttgcggctacctgcgatatctcctgagaagaatttgtagcacatgtcatgcacgtaagccggagctacgttggagagaacggagataactccgattccgccaagtgcgagaagcggtacaacctgatcatcatttcctgagtaaagatcaacgttgccatcacaaagatgcaggatctgtgcaactgtgctgatatttccagatgcttctttaatacctacgatgttctcaacatctttcacaagtgttgcaactgtctgtggctgaagtccacatcctgtacggcttggtacattgtacagaatcgccggaatatttacttcattacaaatagctgtgtaatgagcaatcagtccgttctgtgttgctttattataatatggtgtaacgagcagaagtccgtcagctccatcttcctgagcttctttggacaactggatcgctgttcttgtacaattagaacctgttccggcgatgaccgggatacggtggttcacacgctcaattgcaaaacgggttgttgctgcatgttcttcctctgtcatagtagcggattcacctgttgttccacagatgacgatcgcatctgttccgcctgcaatctgctcctctaacatctcatctaatttgtcataattgacctcaagattctctttcatcggagtaacgatcgctacacctgcgcctttaaaaattgccattctttttatcctccttcaacatggtgaaacaaagtattactggtcatagcaggttattgcgcataagttccttgtgaacgataattataatagccatgagcagtaactgtttaatatacatctatgcaagaatgcgtaaactgtaaataaacataaaagaaacggcaagatgcgccgtccccaaatatacattatgtataattcagatagctctccatcttgcgatgacagtcatgccgctattcacgtcatgcccaagaacaagaactcaggattcttaccctttcggcatctttccctttccgatgagttcttctgttcctgacacatccgtcaccttacttatgaaaaatgcaacctctatctacgtttccgtgtttaagcaaataataacaccgagggtacaatgatgtcaacatggtttctggatttctttcttatttatagtacctgggttataagtacaccttataaaaattgattataataaagtataaccgattttttgacttttttcttatatatatgatatcattaattcgctagatgtgtgaatgacaaagctgtttcatttgcactttttttatgcttgcatgtttgttttttgaaaaacaatcgcaagaaacgacataagataacaagagaaaattgcgaggatgagaaccgcgattcttggaaaaggtatgtggataggaaggagacctactgtgttaacaatcggtaattacgtgaaagttaagacactggaggaggcttacgagctgaatcaggcaagaaacagtcgtatcatgggcggcatgatgtggatgagattaggaaatgcaagagtgaagacaatcattgatatgtcggaacttggtttgaatgagattgaggagacagaccatgtattccgcattggagcaatgtgtacactgcgccagctggaagagcatgaggggctgagaaaattctatggggacggaattgcagaaagccttcgtcatattgttggagttcagtttagaaatcaggcaacagttggaggcagtatctatggaagatacggattttctgatgtgctgactgcattactggcactggatacatttgtggaattatataatggaggaactgttcgactttctgagtttgtaaacagaaaagcagataaggatattcttgtatctgtgatcgtcagaaagagcaagagaaaattccgttacgaatcaattcgtcagacaaagacagattttccggtactgacatgttctgtcgtaacaggaatttacagaggtcaggagtcctggttcttttcggtaggagcaagaccgatgaaagcggcattgcttgaaaagcagtgggagatcccgaaagatgctacagacgagcagctcacagagtatgcaaaacgtgtggcagcagaatttacttatggaagcaatatgcgcggaagtgcggagtacagacagcaccttgcggaggtcctgcttcgcagagagatgcgctcaattttagatgaatataatgcggaggagaaataggatggaagtacagtttaccctgaatggaaagaaagtaagtacagagatcgctgcagatacagtccttttgaaccttctgcgtgatcttggatgtaagagtgtgaaatgtggatgcgagacaacaaactgtggtttgtgtacagtatggatcgatggaaaatcccgtttgtcctgttctgttcttgcagcaagcattgacggacatgaagtgacaacacttgagggtgtggagaaagaagcagcagaattcggctcatttcttgcacaggaaggtgcagagcagtgtggattctgttccccgggattcattatgaacgtgctcgcaatgttccgtgaattgaagaacccttctatagaagaaatcaaagaatatctggcaggaaatctgtgccgctgtacaggatacatgggacagcttcgtgcaatccagaaatatatggaagtcagaaatacagcagttaacattacagtaaagaaaatgggcggggaggagtaagaatggaaagaatagataaagttcagaatctgattcctgagaaaccggaatttgtccacagcaatcaggaaaaaggagaagctatagaatccctgaagattgtaaaccgtcctcttgtaaagaaagatgctgctgcacttgttacaggaaaaagtgtttatacaaatgatcttgcgccgtcagactgtctcatcgttaaagtaatcagaagtccatatgcgcatgcattaattaaggatattaatacagcacgtgccgaggcagtacctggagtcgaatgtgttcttacatataaagattgtccggataaaagatttacaatggctggtcagacctatccggaaccaagtccttatgaccgtctgatccttgaccagagagtacgtttcgttggagatgcagctgcaatcgtggcaggaacttcagaggaagcagttaagaaagcgatgaagcttgtgaagatccagtatgaggtccttgaaccggttcttgatttccgtacagcaaaggataatccaatccttgtgcatccggaagataactggagaagcctctgcccggttggcgcggacaacaagagaaatctttgtgcacatggggtgagtgaagacggagacgtagaggcagttcttgcaaaatgcgatcacgtgatcgaccgcgtttatcacacaaaggcgaaccagcaggcgatgatggagactttccgtacttatacatatttagatgcatacggaagattaaatgtcgtttcatctacacaggttccgttccatgcaagaagaatccttgctcatgcactcgatattccgaagagcaaagtacgtgtgatcaagccgagaatcggtggaggattcggtgcgaagcagactgtagtttccgaagtttatccggcacttgtcacatggaagacaggaaaaccggcgaagatcatttacacaagagaagagtctttgatcgcttcttcaccgcgtcatgagatggaacttcatgtacgtctgggagcggataaagaaggaaatattaaagcaatcgatctctatacactttccaacactggagcatttggtgagcacggaccgacaaccgtaggtctttccggtcacaagtctattccgctttatggaaaggcagaggcattccgctttacatatgacgttgtttacacaaatgtaatgtcagctggagcttaccgtggatacggagcaacacagggacagttcgctgtagaatcagctgtaaatgaacttgcaggagttctcggaatggatccaacagtgcttcgtgagaagaacatggtacgccagggcgataagatgccggcttattatggcgaagttacaaacagctgtacactcgacagatgtcttgccagagcaaaagaaatgatcaactgggatgaaaagtatccataccgtgatatgggaaatggaaaagtccgcagtgtcggagttgcaatgtccatgcagggatctggaatctcagcagtagatacaggtgcggttgaaatcaaagtaaatgatgacggattctacagtctgatcattggagctactgatatgggaacaggatgcgatacgatccttgcccagatggcagcagagtgtcttgaatgtaaaccggaagaagttgttgtattcggagtagatacagacatctctccatacgactgtggttcatacgcatccagtacaacttatgtaacaggacaggctgttgttaagacttgtgaatcccttcgcaagaaaatctgcgagcgtggagcagagtatctcggatgcaagccggaagatgtagatttcgatggagaatatgtaacagagctggcaacaggaaagcagatttcaagaagtcagattggaaataatgtaatgtgcttcagcaacgcaccactttccgcaagtgaagcattttcctcaccggtatctccaccgccattcatggttggtatggcagaagttgagatcgacaaagagacaggtgtacttgaactgatcgattacgtagcagtcgtagactgcggaacagttataaatccgaaccttgcgcgtgtacaggtggaaggcggaatcgcacagggaatcggtatggcactgtatgaagatgttgtatataatgagaagggaaagaacttcagcaattccctgatgcagtataagatcccgactcgtcttgatgttggaacaatccgcgtagagttcgagagcagctacgagccgacaggaccgttcggagcgaagtctatcggagaaatcgtaatcaatacaccatcaccggcaatcagcaatgcaattcagaacgcgacaggcgtgattattagagaactgccgatgacagcggagaagatttacagaggaatttctgggcgttagacttggggtttgagtaagaaacaagtacttagttgagtgatttgaatccagaagacaactacagaaattgaataaaagtgaaaagagaaagctatcgactacgataacaacgaatggagttgtatattgtagtcggtagcttttctaaacatgaaacaaataccaggtgaaacagagcagaatgaggagaaagagatgaacgcagtagaagctttagatgaattacagcgcaaagcaagacatgatgataaattaagagaacagttcataaagacaagggatgcagaagatcctcttggaggattctgctctgtatgtcgtgagacgggttatgaactttatccgatggatattgtgcaggcaggagatgaattttatgccgcaatgaagcgcagtacgaatggtggcggagagaattcaccggtgcttacaggagaggatgacccttatgaattgttttttgcaggactacaagaactgtaaaaataattttagtgtataagcattagacataaatgaacagaagtgattacaaaataggaagatttattgatgataaagataattcgcgtaggaagagagtgcttacgagaagcgtacgaaattgtgaataaggtagaccaggggatgaacgttccagaatggtttgttgcagaaacgtatgaagaatttgatttctggatgaagaaggaacgaggtcttttatatcttgctgttgatgaagagggcaaggcgggagctatgtttttcgtaattttaccgggcgctcacccggataatctgggatatgatcttggaatggaggaagagaaattgaagctttgtgctatgatggatacggcggctgtattaccagagtttcgagggcactatttacaatataaaatgatgcagcacgcggaaggtgatttgagacagataggatatcgctacctgctttgtacggtgcatccggaaaatgttttcagcagatcaaatgtcatgaaacaggggtatcagaagatgcttacgaaggaaaaatatggcggattcttaagagatatctggatgaaaaatattatagaataagaaaacaaacatcggaataaacatctgatgtttgttttcatagaaatgcactaatacgttaatacgtgaaaaagataaagcgaaatactgatataatatagaaaaaagaaaaggtatgtggtatactctcgacatagctaagaaatgacataacagaaacagatagaaacagatttacagaaacaaactgacagagacatgcggatgaaaggagtaacagaaatggagacatacatgcagatgcttggaagacttgcaaagagtgcatcccgtcaggcagcaaagcttggaacgaaggcaaagaacagagggcttctcgcagtagcgaatgaacttgtagaagagagagaattgattttacaggagaatgcaaaggatattgaagctgcgaaagcgaaaggcgtgaagcagtctttgattgatcgattggcactgacggaacagcgaattgaagacatggcagaaggtctgcgtcagattgcagcacttgatgatcccatcggagaagtgcttggcatgaagacaagaccgaacgggcttcgtatcggacagaaacgcgtaccgcttggcgttgtcggaattatctatgaatccagaccgaatgtgacagcagatgcattcggcctttgcttcaagactggaaatgcggtaattcttcgcggaggaagtgatgcgattcattccaatcaggcaattacccgtgcaatcaaggaaggactccgcaaagagaagttatctcaggacctcattcttcttgtggaagatacaagcagagaagttgtaaatgagatgatgaagatgcatggctggattgatgttctgattccaagaggtggagcaggacttattgcaaatgttgtcgcaaacagtacggttccggtaatcgagacaggaaccggaaactgtcatgtatatgttgatgagacagcagacattaagatggcaacagacattatcgaaaatgcgaagacacagcgtcttggtgtgtgcaatgcatgtgagtcacttgtgattcattccaagatagcagatgcagctttgccgaagattgtaacaagactgaaggaacatggtgtagagatacgtggagatgagagagcacaggcaatcagttcagagattattccggcaacagaagaagactggggaacagagtacctggatgcaattatttctgtaaagattgttgattccatcgatgaggcaatcacacatatcaatacatataatacaggacattctgaatccattattacaaaggattacgataatgcattgagattccaggatgagatcgatgcggcagcggtttatgtaaatgcatcaacaagatttacagatggattcgaattcggattcggtgcagagatcggaatcagcacacagaagcttcatgcaagaggcccgatgggactcgaagcattgacaacaacaaagtatattatcttcggaaacggacagatcaggggatagtatagatagcaggttttaaaatccaggtcaattagtgtaagttaaataaacttgtctttgacctggattttatgtatcataattcaagtcaacttatgatttggttataagcttgcccggaattcacaaaattacaatccaagtcaacaacatttctataaaatcacattccctccccaaaaagcatcctattaataaaataagaagaaaataaaaaacttataaaaataacaatcagtgttgacaaacagaaatcgaggtgctatcttagtatctgtaaggtgttagcactcaaaaacaaagagtgctaataacaaacaaagatgaacagaaaggggaacacagagatgtctgtagaagctgaattaagtgaaagaaaacttacgatattgaaagccatcatacagaattatctggagactggcgaaccggtcggatcacgaaccctttcaaaatacacagatttgaaattaagttccgcaacgataaggaatgagatggcagatctggaagatcttggttacatcttccagccacacacatcggcaggaagaattccatcagataagggatatcgcttttatgtagatcttctgatggagaataaggagcaggagatcagcagacgagaggatgcacttcttgagaagaccgataaggtcgagaaggtactccagcaggcagcaaaggttcttgcttcgaacaccaattatgcaacgatggtttccgcaccggtcaacagccggaacacattgaagttcattcagctatcacaggtggatgaagaacagatcgtagcagtcatcgtacttggtggtaatgtgatcaagaataagatcattgaagttggagaaaccttaagtaacgagaatctgttgaagctgaatatgcttctgaacacgacactgaatggattatccattgatcaaattacattaggtctgattgccagattgaaagaacaggctggtatccacagcgaagttgtcggtcatgtactggatgcagtggcagagatcattcatgtagataatgacatggagatctacacaagcggcgcaacgaatattttcaaatatccggagcttagtgataagcagagcgcacaggagatcatcagtgcatttgaagagaaacagcagctggcagatctggtgacagagacactggcaagtgaggagaacaacggcatacaggtttatatcggagatgaaactccggttaagaccatgaaagactgcagtgttgttaccgccacatatgagctgggagaaggtatgaaaggaacgattggaatcatcggtccgaagagaatggattatgaacatgtcatgaagacgctgaaaacgctgcaaagtgagttggatgcgatttataataaagaacccaaagagtaataataggaaggtagaaagctggtgacagagaacatgagcaaagaagatatggtaaaagaagctgttgaagaggcaaaagcaaaggctgcaaaagagcaggcagaagctgaagagacagtagaaacagaagatgcccagggagttgaggctgaagcgaaagaagcaacagaggaagcaactgagactgaaggagattcagaagcagcatcagaaggtaagaaaaagttcttcggaaagaaagagaagaaggacaagaaagacgagaagatcgaggaactcacagaccgcgttactcgtcagatggcagagtttgataacttccgcaagagatctgagaaggagaaatcccagatgtacgagatcggagcgaaagatatcatagaaaagattcttccggttgtagacaacttcgagcgtggacttggttccgtaccggaggaggagaagaatgctccgttcgtagaaggaatggagaagatctacaaacagcttatgactacactggaatccgttggagtaaaaccaatcgaggcagttggtcaggaattcaatccggatttccacaacgcagtgatgcatgtagaagatgagggactcggtgagaacatcatcgcagaagaattccagaaaggttacatgtaccgtgaaagtgttgtaagacacagcatggtaaaagtagcaaactaatttgatttttaacaagattcagagattagatagaggaggaaatttatcatgggaaaaattattggtattgaccttggtacaacaaacagctgtgtagccgttatggaaggtggacagccaacagttatcgcgaatacagaaggcgcaagaacaacaccgtctgttgtagcatttacaaagacaggagagcgtctcgtaggtgaacctgcaaaacgtcaggctgtaacaaacgcagcaagaacaatctcatccatcaaaagagagatgggaacagattataaagtagatattgacgataagaaatattctccacaggagatttctgcaatgatccttcagaaactgaaagcagacgcagaaggataccttggtgagaaagtaacagaagctgttatcacagttccggcttacttcaacgatgctcagcgtcaggctacaaaagatgcaggtaagatcgcaggacttgatgtaaaacgtatcatcaacgagcctacagcagctgcacttgcttatggtcttgacaacgagaaagagcagaagattatggtttacgaccttggtggtggtacattcgacgtatctgttatcgagattggtgatggagttatcgaagtactttcaacagccggtaacaacagacttggtggagatgacttcgaccagaagatcacagattacatgcttgcagacttcaaggcaaaagaaggcgtagatctttctgcagataagatggctcttcagagattaagagaagctgcagagaaagcaaagaaagagctttcaagtgcaacaacaacaaatattaaccttccgttcatcacagcaacagctgaaggaccgaagcatttcgatatgaaccttacaagagctaaattcgacgagctgacaagagacctcgtagaaaagactcaggaaccggtaagacgtgcactttctgacgcaggaatcacagcttccgagcttggacaggtacttctcgttggtggatcaacacgtattccggctgttcaggaagaagttaagagactgacaggcaaagagcctagcaaatcccttaacccagatgagtgtgtagcacttggtgcttccgtacagggtggtaaacttgcaggagatgcaggcgcaggagacatccttcttcttgatgtaactccactgtcactgtctatcgagacaatgggtggtgtagctacaagactgattgagagaaatacaacaatcccgacaaagaagagccagatcttctcaacagcagcagataaccagacagctgtagacatcaacgttgtacagggtgagagacagttcgcaagagacaacaagtccctcggacagttcagacttgatggaatcccgccggctccacgtggaatcccgcagatcgaagttacattcgatatcgatgcaaatggtatcgtaaatgtatctgctaaggatcttggaacaggtaaagagcagcatattacaatcacagcaggttctaatatgtctgatgacgatatcgataaagctgtaaaagaagcagctgaattcgaggctcaggataagaaacgtaaagaagcaatcgatacaagaaacgaagcagacgctatggtattccagacagagaaggcaatcaaagaggttggcgacaaagtcgatgctacagagaaggcagctgtagaggctgacgttcaggcactgaaagatatccttgcaaaatctgctccggagaacacaacagaagagcaggtagcagagatcaaagctgcgaaggaaaaactgatggagagcgcacagaaactgttcacaaagatgtatgagcaggcaggtgctgcagcaggtgcaggtgcacaggctggtcctacaccagaagctggtccggctccggatggtttccagggtgatgatgttgtagacggagattacaaagaagtctaaaatatagaaaagatgccggtaagacagaagagaaacaggcagcagggcatcagataaatgaagcatgaagagaaattctacggagctttgtagcttcgtagaatttcttgaggttaagaaagagatacagaaaggttagtatttgtgttatggcagaggcaaagagagattattatgaggtgctcggcgtaagcaaagatgcagatgatgctacaatcaagaaagcataccgccagcttgcgaagaagtaccatccagatatgaatccaggggataaagaagcagaaataaagttcaaagaggcttccgaagcctatgccgttctgagtgacgctgacaaacgtcgtcagtatgatcagttcggccacgctgcatttgatggtggtgccggcggcggagcaggtggattcggtggcggatttaatttcaatggagcagatttcagcgacattttcggagatatcttcggagatatgttcggtggctccagaagaggcggcgcaagcaatggtcctatgaaaggggctaatatcagaaagagcatccgcatcacattcgaggaagctgtcttcggatgcgagaaagaactggatcttgtactgaaagatccttgcgaagactgtcacggcacaggtgcaaagcctggaacatcaccggagacatgtccaaagtgcggtggtaaaggtcaggtcgtatatacatcccagtccttctttggaaccgtacagaatgtacaaacatgtccgaactgtggtggttccggtaagatcgtgaaagagaaatgtccgaaatgtgcaggtacaggatatacatccagcagaaagaagatcaaagttacgattccggcaggtattgataacggacagagcgtacgcattcgtgaaaaaggagaaccgggagttaatggaggaccgagaggagatcttctcgttgaggttaacgtatccagacatccaatcttccagagacaggatatgcatatcttctcaaccgttgcgatttccttcgcagtggctacactcggtggcgatgtgaagattccaactgtagacggagacgttctctacacagtaaaaccgggaacaaagacagatacaaaagtacgtctgaaaggaaagggagttccatcccttagaaatactcaggtaagaggagatcattatgtaacattagtgatccagacaccggagagattaagcgcagaggcgaaagaggctctgagaaaattcgatgagctcagtggaaatacacttcatcagcatgacaatcttgctacaaaatctgagaaatcagagaaaaagggcaagaaaaaaggattcatggataagatgaaagaagcctttgaggataaagaataaaaagagaatgatgagagcggcagatgctgactgagaggttggtggctgccgctttttagcatatctagcgacgtaagtcgctaatacgctgaagaatatgatatgggaataattgaaaagcagattcagggaatcaaggttaaatagatgatttatagcaagtttctcttggtcgggttttccaaaatcttaacatgtgtcaaatatccagcaaaactcatatccaaaaaaaatccccctagaacagctccttgtatttacacgcgaaatcggatatattagaagatattggaaatgcgttgcacgaagcatccgcaggcatcgtagttgtgggttttgtctccaacatctttacaaatatagcagaaagaaggtgaatttcatcgtgaatcagatcgttttgacaggaatggtgctttctgtcgcaccggtgggcgagtacgaccgcagagttgtcatacttacaaaagaacaagggaagatctcagcctttgcaaagggatcaagaagaccaaacagtcctctagtgggagcggtgaatccatttactttcggtgaattcacgatgtatgaaggtcgttcttcctacacaattcagtctgtaaatgtatccaattatttttcggaattgagagaagatgtggtaggtgcatattatggcttttatttccttgaggttgcgaattactatgcgagggaacggaatgatgagcgggaacttttgaaattactttatcagacgatgcgtgcgctgacaaatccacatcttccgaatcagttgatccgttacattttcgagttgaaagtgctgacaatcaacggacagggaccgcaggtgttccagtgtgtacagtgtggcgaccggacgaggccggcagtgttcagcgcggcgaagggcggacttgtgtgtaatgaatgtgacggagaagtgagagacggaatgtttcttgacggttctacgctgtatacgatgcagtatattgaatccagtacaattgagaaattatatacatttaacgtgaagccggaagtgctggagaagtttggacgcgtgatgggacggttgatgaagatgtatgtagataaggaatttaagtctttggagatcctggaaacgctgttgtgaatactattgaaagacatgatattgtttctacagatgagattttgcaaagagcggatgaagttatgtatgaatataagcagaaacataaagagaagtacctaaaacagcttgaaaaataaggcattagtcgttataataagaaacattgatgtacaaaggggaatatctttaaaggaagatgtgaataacttctgtgaaaagatcaaccggagtgcataagttatgtgaataatgtaaatgataaaaaagaatgtgaggaacatacaatggttgaaaagacaatggacaagatcgtagcacttgcaaagtcaagaggattcgtatatccgggttctgagatctacggcggacttgccaacacatgggattatggtaatcttggtgttgaacttaagaataatgtgaagagagcatggtggaagaagttcattcaggagaatccatacaatgttggagttgactgtgcaatccttatgaacccacagacatgggttgcttccggacatcttggaggattcagtgatccgctgatggactgtaaacagtgtcatgagcgtttccgtgcagataagattattgaagattatgcagcagagaatggaatcgagcttgagagctctgtagacggatggacacaggagcagatggcagcatttatcgaggataataacattccatgtccgacttgtggaaagcatgattttacagatatccgtcagttcaacctgatgttcaagacattccagggtgttacagaggatgcgaagaacacagtataccttcgtcctgagacagcacagggtatctttgtaaacttcaagaatgtacagcgtacatccagaaagaaacttccattcggtatcggacagatcggtaagtctttccgtaacgagatcacaccgggtaactttacattccgtacaagagagttcgagcagatggagcttgagttcttctgcaaaccagacacagaccttgagtggtttgattactggaagagcttctgcctgaactggctgtcatctcttggactgaaagatgaggaagtacgttaccgtgaccatgatcaggaagagctttccttctacagtaaggctactacagacgttgagttccttttcccattcggatggggcgagctgtggggaatcgctgaccgtacggattatgacctgactcagcatcagaatgtatccggacaggatatgacatactttgatgatgagacaaaggagaaatacattccatacgttatcgagccatcacttggtgctgaccgtgttgtacttgcattcctttgcagtgcatatgatgaggagaatatcggaacagaagagaaaccggatatgagaactgtacttcatttccatccggcactggctccggttaagatcggtgtgctcccactttccaagaaactgaacgaaggcgcagagaaagtatttgcagagttatccaagtattacaactgtgagttcgatgatcgtggaaatatcggaaaacgttaccgtcgtcaggacgagatcggtactccattctgtgtaacatatgacttcgattctgaggaagacggagctgttacagtacgtgaccgtgacacaatggaacaggaaagagttaagattgaagatctgaaagcatacttcgagaagaaattcgagtggtaagataaataagaaaagcccggactgtagttcacaggtaagcttgtggattcagtttgggctgtttctttataactttaaaatagcatggaagatagaacaggaggagaatgacatggacagaaaaaatgcatggacaacttacagtaaggaagagctggacagattagaacaggtgaatacagaatacaagaactgccttgatgccggtaagacagagcgcgagtgtgttgcactggcagttgaaaaggcaaaagcagagggatataaggatatcagagatatcattaaaaacggtggagaggtgaaagccggagataaactgtatgccgtgtgtatgaacaagacgattgcgctgtttcatatgggtacaaaaccgttgacagaaggtatgaatattcttggagctcatatcgattccccgcgcattgacgtaaaacagaatccattgtatgagaatgaagagtttgcttatcttgatacacattattatggtggaatcaagaaatatcagtgggtgacacttccacttgcccttcatggagtgatcgcaaagaaagatggtacaacagttcaggtgagcatcggtgaaaaagaagatgatccggtctttgttatcacggatttgctgatccatctcgcgtcgaaacagatggagaaaaaggctgcaacggttgtagaaggagagaagcttgatcttctgatcggaagccgaccgattgagcaggatgagacattagaagaaaaggaaaaagaggctgtaaaagcaaatgtaatcaatcttctgaaacaatattatgacatggaggaagaggatttcctctccgcagagcttgagatcgttccggcaggaaaggctcgtgactgcggattggatcgcagtatggtgcttgcttacggacaagatgatcgtgtgtgtgcatttacatccctttttgcgatgctcgatgtggaagaagtagagcacacagcatgctgtattcttgtagataaagaggaaatcggaagtgttggcgcgaccggaatgcattctcgtttctttgaaaatacagttgcagaacttgtagcactgacagaaggggagtctgacctgaaagtcagaagagcgctgatgaattccagaatgctttcttctgatgtgagcgcagcttatgatccgatgtatgctgaagtattcgaaaaacgcagttctgcattctttggaaagggacttgtattcaacaagtttacaggtgctcgtggaaagagcggttctaatgacgcaaatgcagaatatcttgcaaagatcagaaatgcaatggatgcgcagagtgttgcataccagttcgcagaacttggaaaagtagatgccggcggtggtggaacaatcgcttacattatggcaaattatggcatggaagtcatcgacagcggtgtcgcagtgttgagtatgcatgcgccgtgggaagtgacaagcaaggcagatgtgtatgaagcttataagggatataaggcatttattgaagaaatgagataaagattacgtacttgttgattttgaggaaaattgcatgatgttggtggcggaaacaccatagcaatgatatgtgtaaattgtatattaatcacaaaaaaaatagttgtttccaagttcttataaagcatggacaactatttttttgtgcatgttgcacattgtatggagattaatgcaaatatgcaaaatgacagcctgatggacaatgtgtttacaatttgtgaaagataggttaaccaatatgaaaagtatacaaaaagcatttgtaaaaattgtatataattacggacaaaagacttgactcataagtataaaaccattaaaatattatatgcgaaataaaattattttatttgtaaaaattattttaggaggtcattgatcatggcaaaatgggtttatatgttcactgaaggtaacgcagatatgagaaaccttctcggtggaaaaggcgcaaacctggcagagatgacaaatctgggtcttcctgtaccacagggattcacagtaacaacagaggcttgtacacagtactatgaggatggcagacagatcaacgatgagattatggctcagatcatggaagctatcgataagatggaaggaattacaggtaagaaattcggagataaagagaacccgcttctcgtttccgtacgttcaggagctagagcttctatgcctggtatgatggatacaattcttaaccttggacttaacgaagaggttgttgagacactggcaaaagcttcaggcaacccacgttgggcttgggactgctacagaagattcatccagatgttctctgatgtagttatggaagttggtaagaaatacttcgaggaactgatcgacaagatgaaagaagagaaaggtgttaaacaggatgtagatcttgacgctgatgatcttaagaaacttgctgagcagttcaaggctgagtacaaagagaagatcggagaagacttcccgacagatcctaaggtacagcttatggaagctgttaaggctgtattccgttcatgggataacccaagagctaacgtataccgccgtgacaatgacatcccttattcatggggaacagctgtcaacgtacagatgatggcatttggtaatatgggagatgactgtggtacaggtgttgctttcacacgtgaccctgctacaggagagaatggtctgttcggagagttcctgacaaacgctcagggagaggacgttgttgccggtgttcgtacaccaatgcacatttccgagatggagcagaagttcccagaagcatttacacagttcaaagaagtttgcaacactctggagacacactacagagatatgcaggacatggagttcactgtagagcacggtaaactgtacatgcttcagacacgtaatggtaagagaacagctcaggctgctcttaagatcgcttgtgatcttgtagatgaaggaatgagaacagaggaagaggctgttgcaatgatcgaccctcgtaaccttgattccctgcttcacccacagttcgatgcgaaagctctgaaagctgctacaccaatggcaaaagcacttggagcatcaccaggagctgcttgtggtaagatcgtattcacagctgatgacgctgtagagtgggctgcaagaggagagaaagttattcttgtacgtcttgagacatcaccagaagatatcacaggtatgaagtctgctcagggtattctgacagttcgtggtggtatgacatctcacgcagccgttgttgctcgtggaatgggtacatgctgtgtatctggttgtggtgacatcacaatggacgaagctaataagaaatttacacttggcggaaaagaattccacgagggagacagcatctcacttgatggatccacaggtgctatctatgacggaatcatcccgactgtagacgctacaatcgctggtgagttcggaagaatcatgggatgggctgacaagtacagaactatgaaggttcgtacaaacgctgatacaccggctgacgctaagaaagctcgtgagcttggtgcagaaggtatcggactttgccgtacagagcatatgttcttcgaaggcaacagaatcgacgcattccgtgagatgatctgtgcagagacagtagaagaaagagaagcagcacttgctaagattcttccagagcagcagggagacttcgagaaactttacgaagctcttgaaggtaacccggttacaattcgtttccttgacccaccgcttcatgagttcgttcctacagaggaagaggacatcaagaaactggctgatgctcagggcaaaacagttgaccagatcaaagctattatcgacagcctgcacgagttcaacccaatgatgggacaccgtggatgccgtcttgcagttacatacccagagattgctaagatgcagacaagcgctgttatccgtgcagcaatcaatgtaaagaaagctcatccggattggaacgtaaaacctgagatcatgatcccactcgttggagatatcaaagagctcaaatacgttaagaaattcgttgtagagacagctgacgctgagatcgcagcagctggaagcgaccttgagtacgaggttggtacaatgatcgagatcccaagagctgctcttacagctgacgatatcgcaaaagaagctgacttcttctgcttcggaacaaacgaccttacacagatgacatacggattctcccgtgatgacgctggtaagttcctcgatgcttactatgatgctaagatcttcgagaacgatccatttgcaaaactggatcaggttggtgttggcaagctcatgaagatggctatcgaactcggaaaaccggttaacccaagcctgcatgtaggtatctgtggagagcacggtggagatccaagctccgtagagttctgcgacagcatcggacttgattatgtatcctgctcaccattccgtgtaccgatcgctcgtcttgcagcagcacaggcagcaattgccaaagtaggaaaataatagatgagcaaagatatttttacttcacaacgctaatcgttacaaggaaagatgtgaatgaatacatgaaacatcatcctgagtatactaaagcgaacagatttaaagatattgtttgtaaaatctatatataactcgaaagggaagcgcaatgcttccctttctttataccctcgattaggactaaatccttaaagctatagcttaaaaggaattagtcctttttttgttataaaaattagtagtgttttacgagaagccatttatagaaataagagtgtaccgaatttcggtacagcaagaagggaaggctcagatgtcagaagaaactaatgtgatgaaagtagatagtgaaaaaatcaaagaagtacttagacatcataatgaacttacacaacaattgcattatcaaataattgatatacagaagaagattgaggaggtgaagaaacaatccatagaagtagcagcttatcctcatatagatttttcagccagaggaaaagggggtgttaaaaaagatctagcagatgtgtatttgaaatatcagaaaatggtaaggaacagagaaaaggaacttacagcagagatacttatacttacagctgatgcggaaggagtacatcgtttatatttatgctttcaatctttaaccggagaaggatacaacattatttaccgattatatgtaaaaggagatttatatagacaagtagaagaggagatgggcttaaatcataggatatttgaggaaaagcgaaaacaagcaatcgatgaaattcaaaggctttatgaaagtgatttgacaaatgcacaaatagtaaggatgaggagaaataatattactaacgaaagaaaaaagaaagagaagaaagaggaatatgagcaaataacattgtcagatatcggattataaaattgtaggaaggggaagtggctatggaagaacttagtaaagaactgacaaaaagaatggcaaaagatttacgaacggctaaaacatatcatgtaggaaagaaaagctttataaaacttgccaaggattactgtgaatatgaattaccgaaaatgaaagacattgcattcactcagtatcaaggaacctattggcttgatttcataaatgacgaatattatcgtgtacagataaccttggataaagcgtggggacgatatacgattcgagttcggtgtgatacagatgattttgataagataacaacactagaaaataatatcatggatcaatattttgaagaaaaagttaagaagcaacaaataagtcttgcaaaataaaaaatatttataataaaccaaccaacacatacaaatgtacctaaattcggtacggaaaaggagaaaaaaatgaaaactatagcaattgcgacattaaaaggtggagtaggaaaaagtacaacgtccgtcaacttagcatacagcttcatgtcactgggaaaaaaggtattgttaatagatttggatccacagtgtaatagtactagattttttacgaaagtgaattgtacagggaaaacggtgcagaatgtacttgcaaatccaaaatcgataaatcaatgtatttatcgaacaaaatacaaaaatattgatattatcagaggattagccaaggaaaatgacacagaagaatacaaactgaaaaatgcatttgaaagtcttaaaaaggaatatgattattgcattatagataccagaccagttttcgactgcttaacaagaaatgcaattcatgttgcagatattatgttaactccaattaagtttgataattattgccgggataatctggcacttgtagagagctttgtaaatgagtatgcagatgagaagatggagtggaaaatatttgccaatatggttgcaaatggtagagcacagaaagatgcaatgatagatttgcttggaaaacatgattatccaatcatggacacctgcatcagtcgttccgctgttgtagataacgcactaaatctatacaaacctgtgttgaaacacagaaaaaatagtacggtagcgcaggattacctagaactggcaaaggaactgctggaagcataggacggaggggatatcatggctaaaatatcaaatgtatttgcaaaagaagaagtaaaaaagacaacacatccaaaaagaattacaaaatggattcattatacaaaacttgcaaaaaacgaaaaacaatattgtgatgcgaaagataaggaagaaattgaaggacttgcagatctcattgaagcagatggcatggttctgcaggatctgttagtaaaaaaaatagatactgatgcgtataaaatcatagccggacataaaagacatgcagcctgtaagttattggtggaagaacgagataaaaaagaattcgaatttctgccatgttttgaacagaatatcagtgaggtacaagccgaatttcaaatctacagtagtaactgccatcacgaggagactccttatgagattatgcataagttggagcggatgcaatatttgataaataattatccggaagagttcccggaaatacagggtggacgaatggtggaacggcttgcaaaaaaatataatctcagcagatctacggttggagagtaccttacgatttctaaaaatttaggagatatggcaatgaatgagtttgaaaaaggtgaaatagacaaatcagcagcggtaactttagccagtatgtctgaagaaaatcagattcaggcattatccagaggatgcaaaactgataaggagttaaaaagctataaggaagagttcttaaatccgaccacgaacgaaattattacagcatatgaggtgcttggcataaaagaaattgacgatttagatcggaagaaaacttgtagaaaaatgattgaaaagtatggaaaatcgtatatcagtgtgcattcagacagaatcaatattgattgcacaccgaaaaaaattacaatcaacgagaaagaacttacttggaattgtttttcaaaattgttggataaagtggtatctgtaaatcagatagtcgtacaagatagaaaaaataaggaaaacataaagggtgagcagaaatgcctaaaagtatcctatgagatctatctacgattgattgcagggaaacaaaaatgtgttttcataaaagacaacagatttcgggaatcagaagagatagaaatctatgcagttaaccaacagggatacaatacaaaagcagctatgtttacaattacatatataaatgagcaagaatccggaatagagaaagggtattctttattgaatttggagatgataaaggattcagtgaaagagtagagagatgaataagaaaacaagaagattagtaaaaaaattattgatatttattggattgttaatcctggggagtctggcagattgtctgccggacgtatggtgggggctgattattcagatagtggtgtatggtagtgcactgtttgaaggggttaaattattaatggatacaaatcagagtattactgaacaatgcaatcataatgaggaaaaatagaacataccaccttgcggaattgctgtataaatcggtgaagtccgtggtttcgaagacacaaggtggactgtacatgtatacgatgcaattgccgtgtatatgtacgtatgtatggttggtggtgacagaaatctgtatggtttctgtcaccagtagaaatgtaccgaaattcggtacggaaggaaggtgttttatgaacaaggttgtcttggttgtgatagcattgatattcttggcaagtttggtaattcttttgtgtttgtgcaaagaatctataaattggcgtgacaaaaaatgtacatatgatttcgaaaaaagcatggaatcgcaaaaaaaagattctatggatacatagtaggaggggatgagggaaatgttacaacttgattattattatggaatagaagcagagcaattttcattttatcgtgttccacgtctgcttataaaggatgaaagatttaagcaattatcaagcgatgccaagttactatatggtcttatgcttgatcgtatgtcgatgtctatgaaaaataagtggattgacgaaatgaatcgagcttatattatttataccattgatagcattaaggaagatttgggatgtagtaaggaaaaagcagttaaagtcttagcagaattagattcagtaaaaggtattggattagtagagaaaatccgtagaggacttggcaaaccagatataatttatgttaagaattttacaacattatctgttgaaaatgaggaaaaagagcccgcaaaccctgataaaatcactgaagtcggaaaaaccgacttcaagaagtcagaaaaaccgaattcaagaagtcagaaaatcgaacttcaagaagtcggaaaaaccgaattcaagaggtcggaaaaaccgaattcaagaagtcagaaaatcgaacttcaagaagtcggaaaaactgaattcaagaagtcggaaaaaccggcttcaggaggtcgggaaaaccgactccaagaggtcggaaaaaccgactctaattatactaataagaattatattaatgtgaattatatcaatcaatcagaaatagcggaatcaaatagtgatgtgattgatgaggtggatgatacccaggaatacataaatttgattaaagaaaatctctcctatgattttcatatggagtatgatcaaaataatgatcgtaaaatttatgatgaattatttcaaatcatatgtgatgttgtttgcgtgaaacgtaaaactgtgaaaattgcaggagaagattatccgtatgagttagtgaagtcgcgctttttaaagctgaatagtagccatttggaatatgtgatttattgtatgaagaagacaactacgaaaatagcaaacataaaagcatatatgattacagcattgtataatgcaccagcaacgataaatcatttttatcagcaggaagtacagcatgattggtatggatatcaatcgaatgaaatagatgccggataatataagcagaatattcattgtaacaagcgtctatattaatcaaacaactggaaagatgttcaattctatccgtaaaaaatagaacttacaaaataaatctgaacagtccaagtgttcagtttatttgtaaatcaataatttacggaaaaaagtgtacctaaagtaacctagatgagtaaaaaagggtttgatataatataattaggagaatagatatgagaagaaaattaagaagagtattgtttctgattatgacagcaaccattgtttttgttgggtgtggagagagtaatgcaactaaaacagtagataaaaaagcatcaatagcaacagaagaaaagaagtcagatgatttaataaataaccagaaaaaagaagagacggttgagatggaacaggaatcttttgaaaaagagactattaagaaagaggatgctaagaaggaagactctaagaagaatgatgcaaagaaagatacttctaagcaggaaaatacagtccaaaatgattccaagaagaatgactcaaaaactgactcgaagaagaaagagacatcaaataaaacgaatccatctacttctaataaaaagcaggaaacaacaaagccttccgcatcagcgtctactcctacaaaacctgcaacaaacagtggaagtaataaagagaattctaataagacagaatcagtgcatcagcataattatgtagcacagacacatgttgtacatcatgaagctaccggacacaatgagcagtatgttgagcaggaagcatgggatgagcaagtgactacctatgaggattatgcatgggattgctgcaatgtgtgtggagctgatattacaaataatgtaattgaacatgaaaaagcacatgcattagcgtatgagggtggtggacatcatatagagtatggtacacgtccagttacaacaacggtacatcatgaggcagtctatggaacacgctgggtacaggacagtgtggcatacgatgaaactgttgttgatggatatgtttgttcctgcggagcaagaaaataaaaatgtaccgaaattcggtacacgaaagagaatcacaaaacgtggttctttttttgtactcaattttaagagaaagaggaagaaaaatgagaattcgaagacgttccagggctccgccatggaaagaaaaagcttgattttaactttcatggaaggaggagcaataacagcttaacttagaaattaggagggaaagaaaaatcagatgaaacaaaaaaggaaaaagagaggccgagtcttggcagttctattgacagcacttgtattgataacgtccttttcttttaacatggtatctgccgaagagaatcctgaatcagataaggttcaaagtgagacgattgcagatccatcaagtggtgtagcagaacagcaagatgctaccgatggagataaagaaccagagaaagatgttgagaaggatttagagattgaacgtcaaatgaagcagctcttaaaagaaattggagttgggtttgcggaatcagatgctcaagccaatacatcgagtatgccaagaagagcgaaagctgcaagagctgccggtgatgtgattaatacaggtagaataaaaagcaatagcattggtcgaatcgatgtgattaactataatgatccttcctggccacaattattgacatggagggaaggactgctaggaaatacagatacaaaggaaccacttttctgtgcagatcctatggatagtttcaaagcaggaaaaaaaacaggcgtggatgcatctaccatctataataaagaaacgattcagacagtagctgcaatgatgtattactatgaccattacatgtgtaaatcaatcaatagtgattacgagtatcttatgaagcaatgtgcagtctggtgggtacttaatgcagtgcatggatggtttgcggatggagtacagattgaaacaggaaatggggtgaagtgtgcctgtggtagctggatgtccggtcataagagtgaatattatcaaaacggtttagtatggtcatgggaaaattataagtattttacggatgcgaaaggtgtgatctatcaggggaacggacaaccgttatcttcctggtctggtacatacaatccatccggttatgcaaagctaaaaaaatccagttctgatacatctataaccaatggaaatgcctgctattcactgaaagatgcagtctatggtgtatatagtgagaaatcactttccggagcttccaaagttggaacccttacaacagatgcaaatggtgactccaatacactgacattaactgcaggaacctattatgtaaaagaagtaacagcaccaaaaggctatgcacttgataaaaccacttatacgataactgttaagtcaggagaaacaagtatattaaaagtatcagataaaccaacgatggatccggttggtgtattgcttggaaaagtggataaggaaacgaatctgaacaaaccggaaggttccctgccgctaaaaggagcactgttttttataaatcacaaagtaatttttgattatcttttcaaaagttcttatatgccggtatagcctattgttacaggcttttccggcatttttcattgtggaagatactctcaaatcttcttatatccccgtatgttttggtgttcaaaagtagtaggtggagtagtaaattctccgtttactacttaggcaatcagccgcttcatttctgttatcgacgtttcggaagtcgtatgcgcgtaatagttcagcgtcatattgatgttggaatgtcccatgatgtactgcaatgcctttgggttcattcctgcatttgctaacgtggtgcagaatgtgtggcgtaaggtgtgcggtgtcattacctttggcaatgctaccttttgcgttttgttgtatttccttacaagcccccggaacatactttcatagttgactgccacttttggcaaaccgttccggttaaggaacagaaactttgtgtagccttctaaaataacaggctgtgcatatttccgcttgttcagcacccgctgaaatgcttctaacactttttcactcataggaataacccggttgccgcttttcgtcttaggcgtttccacatagtagcccacgtctgcaatcttcaaaagttggtggtctacattgataagctgtttgcctaagtcaatgtcagcttccgtcagtccgcagagttccgaaatgcgaagccctgtccctaacagtatgataatctcgtcgtagtatttctgatagactttatcatgctgcacaaaggacagaaaagccgcttcctgcgtaggggatagaggttcctttggttccgtatcatcttcaaggactgtgttcaactggaagtcaaatggatttttacgaatacaatcgtcctgtatggctgtgtaaaaggcagcctttaaggaacgcttgtggttgttgatagtcttgaagccgtaacctttttctttcatgcgtaacgcccattcctttgcgtcggagagcttcacattttcaatccggcaggctccaagtttatcctcctgcaaaatccgcatgagctgttttcgcccctgctttgtaccatgccgcacatttgcccggtggcgtatctgctttgcgtagagttggcagaccgtcattttctttccgatatggtcgataccgtcgtcaaggtctttttggatttctttctctttttccctcaacgctatatcgtcgcgctttcctgccggggttttgtccgtaggcactaacttccaagaatacacaaactgcggtttcccaaaggtatctatatatttgtaggcatatctcccgtcttttctctggctctctccggtgcggagaatacgatttttattatcccgtcttttttccgacatcgttatgctcctttccataatggaaagagccttgatatgcttgactatattgtaccacattcaaggctcgatttcactatcagattgcgtccaccgtatcaatcattttttcaaattgcttacgcttaatctgaatacggtttccgttcatcattacccagtccgggacgggattttcttctgccagtttccgcagcttgctttctccgatacggaaatattttgctgcctcttctatggtaagcgtgtacttttcccaaatcggcacgtcgttattgttcaatttgtcgtccccctttcttaatgggtcaaaaatcaatctgtaacataggctttaatcggacggctattagcgtaacctcatgggacttgcacccctccggcggtctgccgaagccctacccattgcctgcgacgcttctaacgctcggactatggctataaggaagtatcattatgtattctgtgcgttatcgcccgcaggctgctatctctgctttacggtgtggtatttctcgctcgcttttctattaagagaaaggtcatggcgtatccaccgcatggctcggcacaaaaggaacgtatccgatttgccttatactgcgtcgccgttctattgcgccgctttctttatcaaagagcagagggctgttctgcgatatggaacagaaaagggggaagcgctccaataccgcgttggtttattcagccttaaatgtgaggattgccctcatcagttttgtttgcagcctttcgcgtatttcttcgtctactccaaaataaacatttcctcgctcatcatagagctttcgcatggaaagacgggctatgtagccgctgaaatgttgcaatacaatcttcattgcgtccgggtcgccctttgacgctgccagtatgacaggataaggtacaagggtgttctccgggtactcggtcggtttaccattcaatccattcatcagcgttttcctccaaatatttttttaactgctcaaaggagcttgtccggcgatactgtaccgtacttcttgagatattgagctgctttccgatttctatatcagttaatccctcaaagtaatacagcagtacaattttgcgccgttcttcgggtaaagcccggatagcttcaagcagcagttttggggttatttcttttcctgccatttgataagacggctctgcttcttcgtcttgaaaatacttatcgacggtataaagctgccgttcctcatgcaaggcaaggtcagaaaaagtaacctcccgaactctgcgccgacgaatttcttcatgggcgttgcacgcttcattgtgcagcactgatttacagaacttttgaaacgcacattgcttttcaaattccctgcgattaggtgtcatggtgttcacctcctttctgccgaaaggcggtagtacctccccttttcgcgggataatacaggcgactttttgctttgccaaaaagagagcaaagtttttgaaaaatcttctgtaaaatgcaaaatgcgcctgcctgcaaaacgcagataggcgcataggaaataacagcggtatttaattgatttgacagttcatatctataaccagacttacccggtggtggaactgtactttttttaatgaatgcaacctatgtatgctgtataacagcaaagaaattcccatagcggcagccctcctaaatgccgctaatttatgttataggtagcagtagacaaaaagaagcggcggctttaaaaatcaaagccaccgcttcaaaggcgcgtgaaaatgtatctgctctgcgacggctttttttcttttgccgtcgtccggcagatatttagattttaaattttagaaaagacgtgggattataaccataaataatatcccaagtagataaaaggcatttacacccaatccaacttttacataaatatcgcgttgctgttttttgagaaataagaatagtgcgtaaagaaaactggcaacaataaaaacaccgtaaccaatagcaatagctgttgcatttgcagccgtaggcttccaaacaaataacatagtaagaggtacaaaaattgtaacaagggatataatacttaaaattttttctttcataatggtttcctttctattatcatttgagttttaatttcagtgaacctgtaaaattatctgcttcaatcaaaacataattgcttgcagacggaagttcaatagtatcattatatgagctttctgtatcacaaaggattttcggttcatcagttcccgtttgtaaaattagtttcaaattcccggtttgagcagctatatcacaagaaatttctattttatttccattatctcgttcaagagctgttcccccgaaaatgatttcattaccggaaaaatcatcatagtcagcggtataatttcctacatagctatctataccaaattcacgttttccttgcaaatctttatcatctgttaaacccttatctccaatagattgtaaggcttgattataattacttacaatttcatctttagaacaggcagttacagaaacaagacaacataacattaaaaataaaggtatcagctttttcattttgcaatcttcctttctgtttttctccttttttgagataaaggggtagctaaagtttctttttgtggaatagaaattattatcaatgataatataagcatagctaacatcgttaaaacacctaataaaatgctttgagaagatgaataagctccggtagtatctgtcacaaatccttctccgttaaagccgactatacttaatccggcagagagcggatacaaatttctgataataggatttttgaagtagatactaatatatcctaatagaaaagctgcaacagccccacctttgaaagagttttgtttttttccacagtgtgcgataagtggcatttctccaataaatgtaaataatgccattccacaaatttgtatagtcccaattataattgttgataaagtcatattctcacgacaagcgattattccgactataatagtgacaaatgaattacataatcctaaaagtatagaaagtagtcctattgtagttagcttcccaatcatcagtttaggaaaagaaataggaataacttgcagattttttagtgtatcatcagtgtattctcggttaatcatatagccaccaatcaaagctataatcataggaaaaaacatggtcatattattccaaatcgtactattaagtaaatcaggaaatgtataattcaagacatttttagcttcatctgtcataattttttgcataacgattgaaataataggggaacacgctacaccaagcataccaaccaaaataatactgtatctttttagcttttgaaattctgttgtaataaaagcaagcatattcacacctcctatatctcacgacgattataaatttttataatcgcataaattgatacgaacagaaagagcgcaataatacagacgcatatatgagttgggacaaaataaggacgcatagtgttataaaattcagctgcggctccattcccctcgtcgtaaaattgataaatccaacgattgattacaggtataggtaagattgttcctatatttacccctactggtgtcagcattcctatatctgttacatgaattacatagttaataattgtgtaaaaaagggtaatgacaatagaaatcaagtcacttttattgaaccatacaactaatgccacacaaggtaaagccgcagctaggagcattattcccaatcctatactcaatacaaatttttgtgccatgttttccatagcaataccaaggatttttgaacacaacacactggcaaaaaagcctaaaagagtataagctactgaaataatagccattactcctatttttgctacaactattttacttttgctaataggaatggttgtaaggttctttaaagtgtcattatctgtttctgtaaagaacagagaagttgcaataacaaccaatatcggcaacaaaagaagaaaatcgccatagtccacaatgccggaaaacaaattatcataattaacttgtgttggaatgttccaatataaagcagtcattactaccggaaaaaccaaagcaacaagagtagccaaaacaaaaagagaacgtcgtttaaatttgtaaaattcgcatttaatcagtttaagcaattccctcgcctcctgtcacacgcttgaaataatcttcaaggctttcttcacaagtatgagcttctgatacctccaatccattttctacaaaggcggttacaattttccctactggtaaatcaagattgtgtagacgtaaattgtggtcgtcctgtatagaaaaatggttttcgtggaaagtacgttccaaaattcttgctgcctgtgcggtatcagaaagagtaaatcggatatgtttgctgcttttttgttccagttccgcaagactttcttcttccagtagtgtgccatggtcgataattccaatatcatcagccagtagcgaaatttctgaaagaatatgactggaaattaaaattgtttttcctctcgcgtcacaaagttcacgaataaaagaacgaacctctgcaattccaatcgggtcaagcccattgataggttcatctaaaatcaaaagctccgggtcgtgcataacagcaagtgcaatcgcaagccgttgtttcataccaagagaatactgggaaaacagttttttgtctttataaggcaatcccaccaaatctaaagcgtctttgattgcgtggcggtttggtactccccgtaaggtagcaaaaatttgtaagttttccgtagcagtcaaattagggtaaaaaccgggcgactcaatcagactaccgatacggggcaacaatttcttttcattcccctgcaaagactttccccatattttaacttcgccggaagttggctttgtcaatccaagtagcattttcatagtggtcgtttttccggctccgtttcttccaagcagtccgtaaattctccctttctgcacatgaatatttaagtcagcaacactcttttgtgagccgtactgttttgtaagattttttgtttcaatgatataatttttgtccatattcaaacctcctgttctgtaaagtattctatcacaccaaccttgcattaaccttgccgcaaccttgcattaaccttgcaatttgaaatatttctccccaaataattaaggctcccgtcaaaaggacgggagaaccttactttgctaagggaaaaagcaaagtaaattctgttccttttccctgtatgctatttgctgttattgtgccgttcatcttttctacaagttggtgtgcgatagaaagcccaagaccgctgcctttttcagaccgtcccttatcgcatttatagagccgttcaaaaatatgcttcaaatcttctttttcaatccctattccattatctgctaatcggatttgcatatttttttcctgctttgacaggattatttctattttatccgcatgactgtgagaaattacattttgaataagattgttcaatatccgcatatagccgtccgtatcaagttttaccctgaaaggctgttcgggaatatcaatattgtaatctatctgcttatcttcaaatatgggtatccagtcaatcaagatatttcgtgtcagctccgcagcttcaacaatatttatatccatagcaaactcattagaatttaatttgaaccagtcaaaaagaacatcaatatattctttcaaatcgtgagctttgcggcgggctgtttcgatatagtcgtccctgtcttttcctgtaacaattcctttatgtgcagcgtcaagatacccaataagcgttgtaagcggtgtccgaacatcatgggaaagacttgtcataagctgtcggtttgtttcttctgtctgccggacagtagaaagcctgctctcataagacacaacaatctcatttatttcataggcaagaggggctaccagttcatttgttgcagataaaatacgcctgtttccatttccgttttttacatcaatcaatgcgtctgttatctcggctatctgttttttaacacgtcgaatagcaaagcaggaaacaagaatagagaaaagtgcaattattatggatagaaaaatgactgcttccatagaaaatcaaacctccttgttaaaacgataaccgatacctttaatcgtttgaatatattttggacttccgggatttacctctaatttcttgcgaagtcggctgataatcgccataatgttgctgtcatcatagaaatattcctctctccacacttcttcataaatctgttgctttgtcagaattttcccttgatttttcgcgcagtataagagtaagtcaaattcttttggaggcaattcaaaagttccattttccgtagtaacagaacgattttcaatatcaattttcaacccgtcaaattcaagttgctgtgatattccgtcctgttgattgaaacgggtataacggcgtataagggaaacgatacgggctatcagttcgtccatgtcaaaaggttttgtcaaataatcatcagctcctgcccttaaaccgcgtactttagaagcactgtcattttttgatgtaaacatcaaaatcggcaggctgctttcttttctaatttcttccaatgtttcaaatccgtccataccaggcatcataacgtccagtatcacaagttgatattctctctcttttaatttttgtaatccctcttttcccatattacaaaaatcagcttctatatcttctgatagcacgctgcgtttaatcagcgcacaaagttccttatcatcatctataatcaaaactttattcatggtatagctcctttccttgtttggttctaccgtcaatcggtttttccgcgtcttttggtatcaaccacatatacccaagttttgaaacaccctgtatgcgtttctccctgcaaagtatctgtacccgcctttcagaaattccccacttctttgctgcttcggggcaagacatatattccataacaacacccgtcctttctgaaaatcttatcataataattatagtcggacacacgaacaatagcaagtatataaatatgaattattatggctatttagtggaactgtatagacatatccaaagagaaaggggaacagtaaaatgtaactgggtgaataaatatggcaaaaagaccggtagaaaaatatgacttcaaggcatttggagaagctataaaagctgcgcggacggggcgcaaagaaagccgcaaacaggtaagtgatgaaatgtatatttctcctcgctatcttgcaaatatcgaaaacaaaggacagcaccccagtctgcaaatcttttttgagcttatgcttcgttacaatatatccgtagaccagtttcttttagatacgcccacccaaaaagatacaaagcggcggcagctcgacgctctccttgatgatatgagcgataatggcatacggattgtaacggcaactgcaaaagaaatttcagaagtcgaaaaagaggacaaataaatgtgtccggcaaattgaatatgatttaggaagcgttgtaatctttacagattgcagcgtttttcttttgctcttttttggcatatagagcattgcgttgtagtaaccagtgaggaaaaaactttcgtagcaagcataggaaaagagtacccttttccgtattttcgccctcccgtcctgcggtgcgtcggttgaaaattgcttgttgggaagtgtcccaaaccctcaaagcggaaaggagcgattgcatgaacggacgcaaaagaaaagtacaaatcaaattctatgtaacagaggaagaaagggtgttgattgagcagaaaatgaagctcgtccctacccaaaacatggcggcgtatcttcgcaagattgccattgacggctatatcattcagacagaccatagcgatataaaagccatgacagcggagatacagaaaatcggggtcaacatcaatcagattgcaaagcgtgtcaatgcgacaggcagcgtctaccaagaggacatagaggaaataaagggggtgcttgcagagatatggcggttacaaagattaagcctgttaaaagcacgttgagcaaagcccttgattatatccaaaatccggataagacagacgggaaaacgcttgtgtcctcttttgggtgcagctatgaaacggcagatattgagtttgaatataccttgtcgcaggctcggcagaaagggaacaacttagcctttcatctgatacaatcgtttgaaccgggagaggtggactgtgagaaagcccatgcaatcggaaagcagcttgccgacgcagcaacaaagggacagcacgaatacgtccttaccacccacatagacaaggggcatatccataaccacatcattttttgcgcggtcaactttgttgactaccataagtacaattccaataagcgcagctactacggcatacggaatatgagcgacaagctgtgtcgggaaaacgggctgtccgtcgtcgttccgggcaaaggcagcaagggaaaaagctatgcagaatatcaagcggaaaaggtcggtacaagttggaaaggcaagctaaaaattgccgttgatacgcttatcccccaagtagcaagttttgaagaattgttgcagcggttacaggcagcgggctatgagataaagccgggaaaatatatctcctgccgcgctcccggacaggaacggtttacccgcttaaaaaccctcggtgcagattatacagaggaagcaatcaaagaacggattgcaggcaagcgcacaaaggcagcgaaagctcccaaagagcagcgtggcgtatcgctgcttatcgacattgaaaacagtatcaaggcacaagagagccggggctatgaacagtgggcgaaaatccataatctgaaactggcggcaaagaccatgaatttcttgacagaacatcagattgagcagtacgcggatttagtcagccggattgaagaaataactgcggaaaacgaaaagaccgcagacgcattaaagagtgtggaaaagcgtcttgcagatatggcggtgctgatgaagcacgttaccacctatcaaaagacaaaaccagtctatgaagcataccgcagggcaaaggataaagacgcataccgggcaaaaaatgaaagcagtctgatactccatgaagcggcggcaaagacactgaaagcgtcgggcgttaccaagctccccaatctcgccgccatgcaggaagaatacgggaagctccaagcgcagaaagaagccctttacactgattatggcaagctgaaaaaacaggtcaaggaatacgacgttatcaaacagaacatagacagtattttaagactggaaaaagaaccggaacggagcagggaaaccgaacgcttacagtagaaatatctataaaagcgtggtaggataaagatattccaatacagacaggagcgtgaaaacatggcagaccaaacaatacccgattatgaaaccatacgcgccgccgttgccggagaaacatgggcggtggaaaaggtgcttatgtgctacaaggacgaaatcgacaggcaggcaactgtaaagaaacgtcagccggacggaacattcaaactggaaattgatgaagatatgcgccagtatatcacaatgaagctgatagaatccctcccccaatttccccttgaagaaatggaaagagaggaaaaaagaaatcgggacaaaaaatcataaaaaggtagacgggaagctgctgcggatagataagcagtttcgacatttgaagcaacggcaaaaagaaactatcagtacatggctttatgaggaataccgccgcctttggatagaaaagggacaggagccgcataaacgcaacaaccgggaaatcgttgccgctgttatggaacagatagaagctgcggggatatggctgccggaacaggaagtaacaaaatatttttaccgcaggaaaacccattaccggaaccggatagaaaaagaattacagccgaagccggaaatgcaggataaagacagtcagacacaaaaagaacagggtgcaggaagccagtaatgacctcccgcaccctgttcttttataggtactgattttagaatgttacgcagtagaaccccgatttcaagggaaaaggtattctgtatcgcctatgccagtttcacgccgtttatgccctgtaaatcaaggcttttttcgcccttattgcgtaaccgccgcgcgtcgtttcctcatgcgttccgctgcctgtctgcgggtaatccgtttccggcagtccgggcagtatttgacgctgtttgattttgatacaaagaacgtgctgcactcggtacaacgctttttatcctcggtcttgaaaagctctgcatagagcaacttatcaaggggaagtacggcggtctgaaaccacttgcatagaagtgaataggaaataagctgcgggcagacacattcctccccgtcgtccaataagatacagtgtccgcgctcgcagttgcagcactccttttttacaaggctgttgactttccggctctgtggcggcgtgagccgcttactcccggtcatacttcatcagcggcgaaaatggaaatctccgcatactcgttttctgttagtggggaaattttctgtaaggtgcgttctgcaaagggacgcatatcctcgtccatgaatggtagcgcagtcgtcatattttccataagctgtgccttgcttccctcatggtaaatactcaacaggttcatttcttcaacggtcagtctaatcatgctcatacctccaattcgtgatgttttgattttgctgtctttttcgggagttttggggatttttctgtttgtaactgcgcccggacagagggacgggactttttcatctctttattcctctcgcttttatctatcagcgcataaacgccatgcctgtcctccaacgtagaaaaggaaaggcttttgtaagggagcatggaaagcagccgttccatatccttatccgttgccagtggaacaaagtagggagaaagttctaccgcacaatgggtcttttcggggctgtccggttctccaagcccttttacattttccacaatccggcgggcttctgcttcaatccgtctgtcatgcagggcggcgatatgtaactgaaaatccccctgcgtatgcggtgttcgttttttctgctgttccctcaaaatgctttttaaggcttctgggtcgtttggctgtgcttcaaaacgtataaactttccaagctgcgggtcagtgttcccgtcaaaatattgtccggcaggttttgtcagctccccatgctcataaatcagcgtgtagttgtcggcagggattgatttttcgattacttcccggaaatgctgcaaataatccagttcataaagattgcccttgattttttcctgctctgtgcctgtcagttccaccgcataggcaaggatagtatcgcgggtctgttccccgtaaaaccgccatgtattatgctgccttgtgtcctttagaaaaacgtcccgttcccggaagcagcacgtcccggacgggcgggaaaaccacaaaagccgtttgtcctccgggacagggcttaccgccgctttctgcaaaatctgtttgtctatgtcaaaatcgctctgataaaaagcggtattctgtttcattatggcttcaagggaagcgataacgtccacattttcaaatttttgtaacttcataggtcagctcctttccaaatcctgtgttttctgtcttgcctgtttctttggtgtctgttctttcgctgctttaagctgcgcccggatagagggcttttcctgtttggcaggcttgccacgttccttatcggttttcaatgcttcggcgtattctgcaagggaaatctgtcctccggcttttgctttttcttccagttccgcagcggtcggggtgttgtttatctgcccgtcaatcatgttgtaattttgctcggtggtctgctcggcagctttcaaatagtttttcggctgcaaaaactctggcacgtccttataccccaagctgtctacatagtgggcggtgtcctgcccgttctgatgaagcaccaccacgtcggaaacggaaaggctgtgtcccttaaaatctttcgggtggtcgatattgaagcgggtgtaaatatcttcaagggacattcccggcgtaaggggtgcggtatagataagctcataattgcctctgtcaatgctgtttcccgccgcctgtatgcggtcgtaaggctcaaagcgcaagtcccgcgtttctttgccgttctttagctgataaattccgaaagtgtcctcgttcccatagagtaagagagcttcccttgatggctcgctttcccgtagttcttgcttcatggcgttgtactcccgcagggcttcccatgtttccttttccacgccgaacaagccgcctttttgtgcgtgtgcctgtaaatcctccaaggtatcaacaagcccctctgtgccgtcctcatagagaagataaacggacatatcctcatggaaaaggcgttcagcggcttcctgctgaagcggaagcataccgtcccaagcatagccgtattcctgcatatccttgacgctgattgtagggtctggcatagggatttccggcgcggcggtctgcgtctttgcgtaaagctccttgacttctccctgtgtcagctccccggcggtaagctgcgccataagctctcggcatttctccggcgttccgatatacaaaacgtcgcctatctttgctttcccgtcctcctgcggaatgtaggcttgcagcagatacaggttgtccctgctgtcgctgcggggatttgcgtgtaccttgtaaatggcttcctgttcgggctttttctgcgccgcttctttttgcgcccggatatgcgcccgttgtaactcggtaggcttttccccggtaaagggtgcaatcgccttgatataatcagccgcatagtaggcgttactggtaagctgccgctgccatgcccctgctttgggcgaccaacggaagccattactttttaaggcttcccgcgtggcttcgtccggcttatcttcaaagaagatttgcagacggttcgcttcggtgtttgcttccaccttgccgccgtcaaattcccaacccacaaaaccgatttccttttgctgtgaaagggatttgatacggtcttttacgcgcctgatttctgcgctgttgttggataacgcccaagtcgcaaaaggcttgtcccccaaatgccaactgctcgccatgtctgctttcagtttttcaagctgttccggcgacaaatgcgggcagccgtcaagggtcttatgcttgcggtagtaggcgtttacggctttcatggtttcctgcgatttttcaaggttttccagtttcttctccaacttctgtactgcctgcgggtcgtctgcgctgataccgcccatgccggtgctgcggattttatcaagaagtccttgtatgtcctgccattcccggtaattgctgtcgcgggctgcgttctgcttttctttcttccttgtggggaagttagagccgcccgcaatgaggatagagggaacacgcgcgtcaatctcatagcctttgttcatgttcgccgccagtttccgggcgtaagtgtcaagcaggctgtcgattttctcatggtacatcgggtctacccgttgtttctgcctttctgcaagctgtacggcttcatctacatagtgcctgtattcagccgtcgcgctgccttgcttataatcagaaaagctgttcatatcctttgcacgtttggcggcagcttcattgattgtgtaataaggtgcggcgggggctgcctgtcccggctgtgtagtctgcggtgcttcgctgtttgcgcctgtatcagcttccggctcggtctgtgcttctttttcctgtaccggggctgtttcttcgggaagctccggcgcggctacttctgcttcgggctgtatggtagcttcctgtggggtctgtgcctgttcggtggtctgttccttatcctgtgccttttggatttccgcaaaatgtccgtctatggtatcaatcagacttgcggcggtgctgcggattgtttcaagagagcctttcagttctgcaagttcttttccgctgctccacccggcgatatacccaaaagaatagtcggacgtatcaagcccgtaatgttgacagaccgcataggcaacgctttccgcctgtacctcgcgggtgcggcggtcgggacgttccggcgcgtctttgtctatgtcatggagtgttgcatgggcgatttcatggattgcggtcttgatgttctgcaattcgtccataccctcgttgatagagatacgcttttcctcataattgcagcgtccttttacgccgccgcttagtgcttcaaatcccataacaaacggggaagtcctttcaagggcagcgaaaaaatcctgatactgttccacgtcgcccgtaagctcctttatcccaaggtcgggcaactccttaccctcggtctgcgatacgtcaaaaacagataccacacgaaaggcggggatttggatttccttttcctcggtaacggctttcccgttcttatcgaaaacaggcttttgcgtgtccgggtcgattttttccacctgtttcttaacggtaaagggcgcgggcgcaagtatcttgatagctttttctcccggctttacatggcggtcaaattccttttcccattgtttatagccttttacaaggttgccgccctgcatggcgataaggattgtattgtttaggctgtaatcatggaatttagacatagtacgcagatagtcggcgtaacggtcgctttcataaatccccaaaatgccctgttccagtcggtcggtaatctctttcattttgtcagcgggcttttcggaagataggataatcgggagaaccgggggctgctctgtggcagtggtcggtatggctgcggcagcgtcaaggtctgcctgttcctgcggctgcggcgttacccggtattcctccggcacgtcgcgcccgtcataccactgtgtaaaggtgttgcggttgttgtagatatatccctgctcggtaaatctgcccccgtcattgatagcagcgtccctcccgtattcctcatacatgaaataattttttgcttcttccggcagctccaactcgtccagttcttcaatcagataatgcccgtaatcttcctcggtttttacggacggataaatccagtaacagtcaaggttttgtgcaaggtttataatgtcctgcaagtcccttgtatggtcgccgtatgtgatagccgcagcaaatttttcccggtcgtcgtcaaactgcatttttaaaagttcgctcaaatagttcagttcgtcaaggctttcaagctcggtcaatttccctgccagtcctgcaatagaggactggtattctgtgatatgcagttccccgtagtttttgccgtctatcccgatacggtcaaagacttctttcaaatgctcggcagtcgtggggaatgatacccattcgcccgcaggtctgccctcggtgtactttccaagattagaaagatacccgcttaaaatcgtttctgccatgcgttcactcctttcgttttcaatcatgcggtgcataagttcgtagtcctctatgctcatgctcccgtcaaatagataggggtcgggttcttcgccgtcccggtaggctttttcagagaaaggcagccccgcagcgtgggcggcggctcttgcttcctcgataagctccggcggcagcctgtcgtcgtgggcttcgataaattccccgatattgctatatccgttttcgtagtggcgacgcaccccggcggtcagttcgtcaaggttcctgtcctcgccaagatagccggaataatagccgtttaccacaacggcggcagggtcagcctgcttgatttcttccatgcggcttctgtcctccgggtaaaggtagtcgcccatttcaaggtggaaatattcggcgttccaagaacgtcccgttttccaaaacgccacccaagcgataccgtcccgtaattcttcttgatagtcctttacggtgtcccgtaaacttgccatgtgtaacctcctttccaaagggcagcgcggacgctgaatgttccggtttcatcattcagtaccccgcgcccgcgtttttgccaaagattttatagattttttcaagatttcagagggtaaaaccctccacaaaacagagggtttgggacacttcccaacaagcaaaaatccccgccgttctcggtagagaaagcagggattttacggaaaagggtactcttttcctatgcttgctattcagttattttttcttcggaagctccacctggtagttgacatatttcccgcccgtatcagccaatacgatagttccgtcgtaggttttgcccgtctttggggaatagagctttttcacatttaccttgccggattttaagagtgccgcggcaatttttggggtaaaggttacttttcgttcttcaaagaaacggtcatttttccacatggtaaagctacattccttattgctgcaatagtagtttttctttccctcatagacaggagaaccgcagcgggggcagcttcccaacgcttcccgttccggcttgaacatctgcgctttatcatcagaaagaaacggataggtctttaccagttcccgcgccatatcctcaataccctctataaatgcggcggggtcttccttgccttttgcaatctgcgtcagattgttttcccattctgcggtaagctgcgggcttgtcaaggtgtccggcaggacgcacacaaggttgataccgtcctttgtgggaagtagctgcttgccttttcgctccacaaagccgccctttaccagtttttcaatgacggcggcgcgggtggcgggagttccaagccctttgcgttctgcgtccgggtcggtgtcctcgtttccggcgcgctccatagcagagagcagcgacgcttcgttgtgaggttttggcggtgttgtgtcatgctccgttaccgttgccgccggattttcaaaggtctgtccctcggtaaatggcggcagggtattttctgtgtcgctgtctgcgtcgtccgtttcgggcttgttctttaaggctgtcctgtattttcggtcaatctctttccacccgtcggacagtaccgtttttccccttgcggtaaaggactgtccggcacactcaaaaactgctgtaaccgcttcaaaggtatgcggtacagcagtcgccataataagacgccccccggcaagagtaaggatatttctttcgctttccggcagcgctgcaaggtcggtctttgcaagctccatagtagggataatggcatggtggtctgatacctttttactgttcagcacctttccaagctccggcgtgaagtcttttcccgccataaaagaaaattttccgcaaagcagcttaataatgcccgccgctgtgtcgcccatgtcgtcagtaagatagctgctgtctgttctcggataagtaagaagtcttttttcatacagggcttgtgcaaggtcaagggtctgttttgccgtatatccgaacaggcggtttgcttccctctgtaaagaagtaaggtcaaagagtttcggcggggctgcggtctttttctctttcaaaagggaagtacagactgcttttgacgcttcgcaagtcgtttttaatgcgtctgcttctgccttatctgaaattctttcacttgcagcttccgcgccggataaggcaaggcgcacatggtagtatttttctttcttgaaagtggtaatcgctgcgtcccggtcaacaagcatttttaaggttggggtctgtacgcgccccacgttcaaggtatgattgtaaaggacagagaaaaggcgggtggcattgataccaattaaccagtcagcctttgccctgcataatgcggaagcaaagagcgcgtcgtattcctcgccgttcttcagacgggaaaagccctctttgattgcgctgtcctccatagaggaaatccaaaggcggcgcataggtttcttgcagcccgccatttcatagacaaaacggaaaatgagttctccctcgcgccctgcgtcgcaggcattgacgacttcggaaacgtctgcccggtgcataagctcttttagggttttgaattgcttttccttgtcagaagcaacggtgtacttccattcctgcggcaaaatcggtaagctgtcatagctccactttttatattgttccccgtaggcggcagcttccgcaagccctaccaaatgtcctacgcaccaagaaacgatatagccgcttcctgtgagaaatccgtctttcttttcctttgccccaagtacggcagcgattgtctgcgccacactgggcttttctgcaataactaaaatcaaatataagttcctcctttcgggtaaaagaaaagagcaaccgatttttcgattgctcctacaagtgattgtataaaattgtgcgatatgaaatagtaaaataatttgacaaactgtagctttcggttatagatttacaatcataatatattcctcattattttcatcaacaacagtaaatcccactttctcgtacatcttgactgcataattacttttctgaacggataaggatatttttgaatatccagccaatttttctacctgtaatagttgtttcaataatgaagttccaatgcctaatcctctgtattttttgtggacagacatagcaagcgatggagtatcattatcaatgtgtccataatcattcataattcttacccaaatagctcctattacatttccctgcatttctgcaactaaggctttatcgtgttttcgatttccaaactcaacgatatattcttgtaattctggacattctattactgatttaggtggcggttcaattccttctggaatataaatcgcttcgtacaaaaaatcacttaataaacagtattcttcacttctcatttctcgtattatatagtccataatttcactccaaagtccgattttacttaacaatatgtgctgtgataattgtataactatatgaattgatagtaattttgatattttcaacttcgcaataccaatttttaccctgtttgtatatattgcaatttttatccaacaccttatttttgcaatactcaacaacatctgctgtatctatttttaggtttcttttaattctatcaattcccatttcggttgtatgaattttatcaatattatcaagcaatatctttttatcttccattctttcttttcctcaacttcaaatttgtttaactctgtcatttcctatggttggaacaattatatcatattccatatcgcaagtatatctttttatcgttctgtcggttgtttgttttcaatctttctgatacagtaccccacacaaggggactgtcccttataagggcaggaagcacaagccgggggataaagaacaggcggcgcattatcacgccgcctgttcggtttctgtatcatcatcttttcaaagggattgtcggtaaacagggtcatagggtttcttcctccgtttcttcatcttcggaagtttccccggtatctgcttccggctcgtcctcgtcgtagtcctcaaagtcaaaatcttcaaggtcggtgtttcctttcacgttctgcttcggttttacaaacttaaagtagtagaacactgcgccaccaccaagcagcacaaagaggactaaggcaagcaccgcgccgggattgccccctttttctttcggttcttccggctgctctgtgggtgttggggtaggttctttgcctgtgcagcctgtcagagtagttgcacatacagggcaggacgtatttacttttccggcttcgcatttctccgtacagttgcagacttccggttttttcgtggcttccccggtttcggtcagtgccataaggtcggcttcgtccacttgattaaggaaatgtacggtctgttccccctcggctgcccggtcaatgaggatatagaaataattgccgcctttggtggtaacagtgataagctgcttattgccgccgaaatcgtccaccagtgttgcgttgccctttggggtaaggggcggcgtttcttctttttcctccacaactacattgctgtcgttggtcgcgtcctctgtaggcggctctgtggctgtcccctgtgcataggcagggacagaaaaaccgcccataaggataagggcggcacaaagggctgtcatggtctgtttgaatttattcttcatctgcattttcctcctgttcttcatagtctgtggctgtcatgccggggatagtatcgcctttgagcatggcgttaagttcctgtggggtcatacgcatagcgcgtacaagctgcacaatttcaaggttttccgcttcggttttctgcgcttccagtccttttaatttgttttgatattctgtgattttctcgcgggtctttgcgatttccttattgatacggtcaattttattgtttgccataaagtaaattctcctttctttttggggctgcttaccagttcatcagcccatagcctttgatacattgatagttgaggtcgtagctttttatcttgcaggcgtcgccggaattgccctcaacggtatagacgcggctgccgtccctgccaagcacaagccccacatggtcggcaacaccgtctaaatcccagtcgaaaaagatagcgtcgcccggtgcgatattctcatagccccgcgcgccccattgtccccttgactggaaccagggaacgccttgccattcgcagcctgcaaagcggggttcgctttttccggcttgattgtagcaccatgacacaaagcaggcgcaccattccacgcggctgttaaagccgtaccaactccaataggggtagccgcccacatttcccacttgctgctttgcaagctccataagctccgggtttccgggacgtgtgccgtttacaaactctacgccgcttaaatcctcggacgggctaccgtcgggggagccgccgccaaaaatcagcggtttgttgccctgtgtctgtaagtacactttgaacatttcaaactgctgtgggttcagcagttcttccgcaagggaagcaatcggcttgtttgtcagtttcacatttaagatacggtattcgtattcttcctcgttgccctcctcgtcggtggtggtgcgtatctcgatttcttccgtcagcgtcaaggtgtactgtaagccgaacagccgctttagctctgcctgtgcgctctgcggggtataactctgcaaaagggcagtcagataagacgcaagctcatgtgggttatgcccgatagtatcaaggtcatagcggtattcatcatagccgctgtgggtgctttcgatagcgtcaatctcactttgcagttcgttttccattgcggcatagctctgttccgttgccacaaggtcgctgtcctcggacgtgtaggaagtccctaacacgctgttcatgctgccggaaaacattgccccacaagaggaaagccctaccgataccatgatgaacagaagcagcgcggtgatagcgattatcacgcctgccgggtgtcgccctgcaaaggcagccgctttttttgctgctgtttgggacgctccggcggctgctttggcggtagctgcgccgcctttctttaccgtctttgcatactggcgtttgattttttgtttctgcatgaaccgggaaaagggattacttgtaagctgcgggttttcctgcaaggctttgtgatactggaaattgacgtttgccttaaacgctgcccgttctgcctttgccgcttcccggtagggtttcagcttatggctgcggtagccctgttttagtttctgcgtcccgtaccttgcgccgcgctcggcaagttcctccgatttgtgcgcgccctccacgccggaattgtctttctcgacgctgtggattttgttgtgaacaaaaatacccgcttcctgcgcggggcgggataacggattattgtggggtttgccgccgggtaggggcttttcctgttcctcaaagtgaagccgggtctttgcctttccggtggcttcctcaaaggtgcgctcttttaccagtttcttctgcttcgggagagctgcctttgccgcgtccagtttgtcggctgctttttctgattttttgatgtaagtttccagttccggcgttgcccgttcctcgtcggtaaactgcaagcgggaagtggaagtacgcaaaacggtagcttcctgcgctttcttgactgcctttttgcttgcctttcgggtatgggctgcgtcaaggtgttccatgacgcgctctgcggtagcggtgtccggctgtgaaaagttgctgtctgcttcccggctgctgatacgctcggcggtctgctgtgtttcgttgacttccaccgcaccgtcgcgggtcattttctgtgtgattttatcgcgtggttttaactgtttcataggctgctcacttcctccggcttcgtcgtcataatgcggtaaagctcggtgtctttcgggaaatggtctacaaagggcagcaccacatttccgtaaaagataagtccttcgcctgcttcggtgtgggttacatatttcatctgctgtgggctgatatttagctgctttgcaaggatagcccggtcgccctgcgcctgattgagcatgaggacaaaatcagagttttcaaagatattttccacctcgcgggaagcaagcaagtccttgatgttctgcgtgatagctgtgggtatctgttgtgtgattagcggacagttttttatctgtccctccggggctttcgcccattttcagcggtatgtctgttcatacccggcatagcatatctttttatcctgcggtttatgccgcagaccgaaacgatagcggagcctcgtggggctgttatattcccggctattgcaaaccgggggtcaagccctatgcgttgcgtgtgtatcaagtattaccttgacacttccactcggattaggattgcaaaacctttcccgttttcttctccgctgatattcttaaccgttcttttcggcttcggttaagacggcatacacaatccccatttgcaagattgtagggactgtgcctgtttacctccccattttctaaaacgcttccaaatctccacactgtaagcggcggtctgttcctcttttaagagcaaatgaaattcgtccatatagtagcgggtagatttcttttctgcccggttaatggtaacgcggttccatatctggtcttgcacaatgagcatacctaattttttgagctgttttccaagctgcttaatatcaaagcagacaaggcggttagaaagttccacgttagttctgtggttgaacacgttaagactgccggaaacatacagttccaacgccgccgcaatacgggcagcttccggctccggctgttttaacagctcgtcgtaaaggtcgcccaaaataggcattttttccggtacagggtcagcaagatagtcccggtacacattccttacggcgcggtcaatgacggtcttatcaacgggctgcaagccctccttgccgccaatgacaagctcgcagagggacaggataaaatcacttttcagtgcaagggggctgtcgtcctcgctgtaattaaggttcatatccatagggttcacatactggggcgtaccgtccatgcctttcccggtcggggataatcgtatcacttgcccgccaagccgctttacaagggcaaaatactcggcttccgggtcgcagataaaaatatcgtcgtcggtaatgagaaaggcatttgtgatttcccgctttgccgcaaaggattttccgctgcccggtgttcccaagataagcccgttggggtttttaagctgcttgcggtcgcagagtatcatgttattacttaaagcgttcagcccgtaataaagggcagccccggtctgaaatagctcctgtgtgatgaacggaataaaaatagcggtgctgctcgtcgtcaaacctcgctgaatagggataaggttctcccccaaagggatagaggacatcagccccgcttcctgctgatagtcaagacgggtcaaggcgcagttgtatttctgtgcaatgcccgccgccgcgaaaatgtcattttccagtttccgcttcgtgtctgccatgtttaccacaaggaacgtgagaagaaacattcgctcgttgcggctctgtaaatcctgcaataaattctttgcttcatttccgaaagtggcaaggtcggacgggagtatgtcaatatcgtaaccgcttctaaccgcttttttctgttcctcaatcttcatcttgtcaaggtctgtgattttgcgcttaatggtcttgattgcttccgactggtcgatacttttaatgtggagattgacaataacccctgtttccaagtccaacatatccgctaagatacggtcgtttagctccggggcaaggatttcaaggaacgataccgcccccgtctttttccccatagcaaagtagcgtccctccctgaacttgaaagaggacggggcgataaagtcctttgtggtaagccccgtcggggtcagccagtcataagagaatgagaacggctcgcctgccgggtggaataccccatgcagcacctttaagcgttcatagcccgataaggggtgcgccgatacgccaagcaccttgaaattgttgagtacgtcggtttcaatacgggaaagccgcgcccttgctgccgccggattgtccgcttcaatggaaaacgtgatgtacttgtgctttacaagcccgttgttccctttggcaagctgcgctttcagcatatcggaatactcggtgcggatagagttaaaatcgtcgttttgcggcgggatatggattgcccgcgctgcctgttcctgctgtgagccttgattgatgaaagaaagctgcacgttcacgctcgcgtcaaagtagttgaggaaatcgcaccagttttcaaaaatggcggtcttatcatctgcctgtgcaagctgatagttgatgtcctcaaaagcaatgctttttgaatatttccgctgcgccactttgcagataccgtccgggtacatggcaagatagggaatggtctgctgtgcggtgtgggctttcccgtccccctttgcctgccggataaccgccgctatctgtttcttttccgcgcgggtcagcttacgcttgtttcctgcagtttcccgcgtcttttttgtctgtccttttgacaatcgctgatacctccttttctaatgcccgctgtttctccaaaagtgcatataggttttccgtctgatacggtcgcactttggggcgggtcaattttgtctgaatgatgttctttataaccacttcaaggggctgtccatgcttttcatacatggcaaccaagaagcagggaagcatgacgacaatcattgccattgccgcaaggctcgtccctgcgctgtctttgagcaaaaagaaaagcggcagtcccataagaagtgccactgaaaaacaaaggatttgccgctttgtcagattgaaagcgacttttgttttgactttggataagtctttgggtacaggtacatacgccaagaaaaaacctcctttctgcgggactttcccgcgtgtgctgtgttaatgtgcattgaaaatggattttgccagtgcgccggatttgaacagggagaaacaaaggataacggtataggctgcaagggaaaaaatcgcgctgtgcagattgtccgctaccaccatttcgcctactaaaactgcgtaaatgccgacgcatatcataatgaggaagccttgaaagcccagtgcaaacagcccctttaggtagttgttcccaatctgtccccattcccggtttgtcatggtggcaaaagggataggggaaacggaacagtaggcgtatatctcaatcattcttccgtagaggataacggttatcagtacggacatgattttcatacaaaggcttacaaggctcgtttccatgacaagtaacagtagttcggggatttccatatcttttagtccctcctgcatggcggcaagggcttcggttacgtcgatattcgtatcgccgccgattacccccgccgcgccggacacaatatgctgcgccatatcaaacaccgccatagtaatatcaaaggtatgtgttaccaagaaaacggcaacaaaggctttgaaaaaccacttgaaaaacataaaagtgtcaacgtcgtgcatattgtttttttccgttaccatgctgataagctcataacagaggacataggtaatgacaagccccgcaatgggtacaatcacattttccgacaggttttgtatcatgctgaaaatgtttgcgttccacccctgcggggtcttgcctacctccgctgcaatggtgcctactttttcatttacgtccccgaacatagttgacagattaccgtttatcgcaccgataaggatttcctttatccattcgttaatcgcgtcaagtatgctctccataggctaccctccgtaatcttatccgaacagaccggaaagaagcggtacaaggatagtgccgataagggcaacgccgccgcccgccatgagctgttttatccccaattaggtgtaaaactctgctcgatggcgggcggcggcgtacaaaaaatctatatggtgtttttaagagaaccgtcccggcgggacaggtcaggcagtgacctgttccacctctgggatgggtttgagattaaaatgaatttcgatagaaatgtgtcttgttttatcttcgtcaatgcgctcatgcacgacgatttctttgattaagcggttgagggtggctgcgtccagctctgtgatattggcgtattcctgaatggcttccacccattgttttgcgtcattggcaagctggacttcatcggacagccgctttctgccctcggacacttttgctttaagctccgcttgctcggtctgtgtcttttccagcatggtgttgaaattctgttcactgatacgccctgcaatcatatcctcataaagccgcattatcattttgtccagaacctcaatccgttcctcgtcccttgtgagggagcgttccattgcttcccgctgttcccgctgctcggcttcacaggtattggtcaagcggtcggcaaccgcttccccgtccatcagggcggctctggcacattcccggattttccgcagcacatggctgtaaagggtgtcataatcaatccggtgctgggtgcagtggttctttccaaaggcattgtaggttttgcaggagtaaatctgctggggatgttttgcgtttgtgtagcgtatcgtcagtgacttcccacactcaccgcattttatcagtccggcaaacaggctgatttcattggtctgccccggacgctggcgggatttcagcttgttctgcacaatgtcaaagctcatgcggtcaatcagcggttcatgctgcccctccaccacaatccagtcctccggcttcttttccccaatcgtgccgattttgaaacggtagtcctttttctgggaagcaatcgccccggtgtagacgggattcatcaaaaggtctttgataacggagaagtcccacatataccgcccgttttccgggtctttcttttcccatttggtgcgggtattgcgaagcccccgttcccggttccaccatgtggggcaggggattttttcttcctccagccgtctgcggatatagttcggaccatgaccgtttagggcatatccgaaaatcagccgcacaatcggggcggtttcctcgtcaatgagcagatggtttttgtcctccgggtctttccgatacccgaacggggcaagacacccggtaaactgtcctttctgcgctttcagaagataagaggaatggactttcttggaaatatccttgctgtacatctcgttcaggatattcttgaacggggcaatatcgttgttatcacgcagggtgtcgataccgtcattcatggcgatatagcggacaccgtttcttgggaaaaagtcctcaatcaaatgcccggtttgcagatagttacgccccagtcggctgaggtctttcgtgatgacaaggttgatttgcctgcgctcaatggctctcaacattctctgtaaatcaggacgctccatattaagacctgtgaagccatcgtcctgatagactgccacaacctcccatccctgcttttcgcagtatttttccagcatatcacgctggtttgcgatactggcactttcgccttgcaggtcatcgtcctttgacagcctgcaatagaccgctgcacgataccctccggcaagtgccgaaccgattgttctgtattccatttcgttcatcatagccatttacccacacaatccagacggtatctggctcttttgaacctcatcttcattatagctcatatctttccttttagcaagatattctttcgtatttgtcttaccgtatttctgggaaatcaggctgacgaacacatcggttgcgtccagctccccgtcaaacaccgttgtaacatgaatctctgttttgttttttgccataggcagttatcctccatacatgaaaatagccagacagagggtgtcggcaacgaagtccggcaacgggcttcaaaagaccttgcaaacaatctcaatctggcgatggttactatttatacttttcttttatttttctgttgttttggttgtcataggggagaaaagccgatagtttcgggattttccccggcaaccggctcggcaacgggatagcaacagggggtgcaacgggctgccattttcagaacggaagctccatctgttctgtgacctccacaaaaccgtccatcgttttttcagacgggttgccggagtccgttgccgggttttcacgctcccagcccttttgtctgccatattcggaaaacattcttgggttcgggaagtaccgccagcggtcaatgcactggttcataatctcgttgatttcccggatttcccattgcttcggctcgtcaaaggcatggttcaaggcttccttatagagctgcttggagcagaccatgctcccggtgtacttatcaagatacgcctgtatcatcccggctttggtgtcctccggcataaaatcccgctggtgttctttgagataccgctgcatggcagggctgaaagccagcttgaacctgccgcttctgtaaatttccatcgcttctgcccacatctgctcgatataggctctggaagcggcttcgtcctccaaaatgtgaacctcggcttgctccgggtacaccatgacggggataaagcggcggttgccggaacggtcaaggggcaggaagtcaagggcattggaagtgccgccaaacacgcactgacgggggcggtctgctgggtgggtttcatagggtatcttgtaaacctctttctgccggcttaaaaatgacttgatttcctcaatgctcttggcgtttgcggttgccatcatttccgacatttcgataatccagtgaccttgcagcttacggtacacattgtcatcgtccagcttccgcaaatcatcggagaaccactcgtcccggactgccagcagacggaagaaggtggactttccagccccctgaccgcctaccagacaaagcatgatttcaaacttgcaccccggctgaaaggctcgtgagattgcacccagcaggaacagcttcaacgcttcataggtgtaatcgtctgcgtcagcccccagaaagtgccgcagacagaaacggattcgttctgtcccgtcccacacaagggcacttaggtagtcccggatgggatggtacttgttttcattcgccacaatcccgatggcattatcaatctttttctcattggtaagcccataggtttcttccagatagagaagcagatacttcatatccgtatcgttcagggctgtgctttctctgtgaaaaccgatgggctttatgatgtccttgcggtcggtcaggatgttgtatgcgatagccccggaaagcagagggtcacgctggaatacggtcaggcagttccgtatgctctggcggacaccgcctttctcggtggtttccagccccgccttgatttcctcaatgctctggggcggctgcatggcgttcatggtgttttttagttcttgctgcgtctgcggctgcaagctctgccattcgctgttcaagctgtatcacatcctttccgtagtccgcaatcaaagccgctttttcctctgtctccccgaacagcagcacatccagcagatattccacatgggcttgcttttgtaaggcttccacaaaccggggatgaaaggcttcctctggggagtgcggggcatattccgttctccatgccataagcaggtggagataatcggcaaggatacggaagcagcggttctttgcttcctgaaactgttcctccggggatttctgccggggcttgggcttttttgcctttcccggcggtttccagtcctcataggaaagcccaaagtcatttgccagttgtacggcggcttctttctttgccagcccatacagggcggcggcaaaatcaatcacatccccatccgcaccgcagccgaagcagtggtaacgccgatccagcttcatgcttggggttttatcattatggaacgggcagcaagccatcccgttccgacctacatggattccataatgctccgcagcctgtcttgttgtgacggactgcttcacagcttcaaatacattcaaatctatccctccttgaaaataagaaaagcacctgacattctctgattgaaaatggcaagtgcctgttaaagttccatatcctgttgtctgtgtttcgcctgtgccggggcggttctttgagcctttttctcgtctgccttatcctgcaagacttccttgatgggctgcttcttaggcggctctttactttcctctgtgccgggtgtggctttccgtacccagtagcggatgtcccgcagcttcttcaaatcctcctgtacctcggtcagtggtactttcaactctgcgatttcttccagaagcgtttcctgctcctcttgcagctccttttgggtactgtccttatcatctgggtgcttggcaaggtgggtggcggctttttcataccgggcaacctccgagtgttcctgtttgaatttctcctttgttttcttaaaaaatatcttctggtacttctcatagacagccttacattccttgcagtctgtccggctggcaagaatcccgtcaatcactttgctgcgggcttcctttggcttcatctgattgcggtaatctgcggctgatttcccggaagattccagaaatgcttctaagtcctccacagtggaaagccccttttgctggagataggacagggcttcgctgactgcctttaagtcctgtgaagtcccccgattttgtccagacctcgtccagtccttccgttcttcctttcgtatctccatatatttcatcagtagattgggaagaagtgttgcttcctccgccgttttttgtgcaagcagttctttccgtttttctcccagctcggtaatccagcctttgaggttttggataagctgccggatggacttcatcaggcggttggcggctctgatttcccggttcaggttgccgatgttcgtctggataccccgcttttccatctgccggacagcagctccctcatggacagtagggataatatcaagcccctgtctggcataagaacgcaagtccacacgctctgggcggtcattggcttccagatagcggttctggatgacctcccattcatgccgccagatttcgcaatacttctggtcgttccaatccaccgtatcctccttgtggcttttccatctgccggacggaagttttatccgttccccgttttcgtcaaggtcataaaccttgcggctcttgggaagccattttccatgttcgtccattgccctcatagtgagcaggacatgggcgtggggattgtgtcccggcggatgggggtcatggattgcaaaatcagcaatcatgcctttggaaacaaactgctgctcacaaaactcccggacaaggacagcatactggtcgggcggtatctctctggggatggtaagcacccaccgccttgcaagctgggagttccattgtttttccaccgcttcggcggcgttccacaaagtattgcggtctgcatactccggcggggcatttgccgggagcaggatttcattgtggacgataccacgcttttccgggtagtgcttcacttgctggtcgtattcacagaacagcttttcgccgctttggtaagcagcggcggcaaccgcagactgtcgctggctgcgctgaacaatcgtgatttcgttgtgtgggcagggcatttcgtgtccctcctttcggtaattggtggatggggtggcgttttaccacctcattttggcagaaaaaaagcaggagacctttttcagatttcctgctcggtgtgccgctatgtgggcggcgggtatttaattgtaaaagttcggggcaaattgacccgatgtgcggatggtaaactgggattgttaatttggaacaggtcctataatgccaactgctattgcatcaataaaaagcacaaatgctattacacaaacaattaaaatagttgtaatgactttaataataagttgttgatttttacgtaaatcactcttactgacaattcttaggacaaaaatcaaaacaaagatgatgataagagaaataatattataaagaattactgttttcatctgtgtatcctccttttccttatcaattccgacttacagaatacctgttattgaaataattgcacaagcacaggcaaaaatgcccatacataaagaggcaattacccatttctttttcttctgtttgtgatattccattgcattaaacaattcttttaaaccaaaagccaatactaaaaattgaagtattctaatcatgtccatcaatcaactccttcgccaatttttgatttattggtaattttattatacttcattgcctatcgaaaagatagcgtattttatgaaacttgtcggctgggaacaacttgcaatgcaagatgtccccagatggcaagtccacaaaagggtagctggcggcagccagcgcaggggaagtgtagcgtcccctgtatgatttggagcagaccatgactgcggaaaatcacagccctccggcgaggagccttcggagaacgcaatgcaccaacctctgggtggtgtataattgcgcccttagtaaactaaggggtttctggcttcttccgttccagcagttttttcaataattcctgcgtgtcctgtctgtgaaaaatgagtttcaacaacagcatgacatcatcatctgtcaggcgttccggctcttgcagaaaactttccagcataccgccacgggtacagagccggtgcgtccgttcctttcgggtaagctgctttaactggtgctgcaatgccttttcatcattgatggctttccgcagtttcttttcgcttttctccagctcccggttgagcttttccagctttgaggtatcaggcaagggcagcgtcctcctttcccggtatcagcacataaattcggtttggttctccaacgccctgacgcacccgcatgataagtccggcggtttccagttcattcagagaacgcttgaccgtcatagagctgcgggacaagactgcggcaatggctgtaacagggaagcagacaaacaggattccgtgctcgtcctcctgccctttggatagcatagcgtccagcatccggcagtacatgacctttgcggtgctgctgactggaaatcctgtcaacgctctgggaaatggcatacagggcggcaatggtgtgtctatcgtcataaattcaaaattcattcggtgtgttcctcctttttctttgctcgtttggataaataacgggggcagtcaatcacaaccgcccggaagctctgcctgcacccatgctggcatttccggcataattcgttgtaagtgacacgcccccggtcattgaggtaaaaggaaagctcatgcttcctctttttgctcattctcggcatattgcgcttcctcccgttttagtgtatggtttcggggcgattttcggcaaaattacagccatagagccgcttaaaatctcccgaagtatcagcgatagggtagactgtccccctatcagattgtcgtgtttcggtatcatttcggtgtcagttcgccagttctccccggtgtcgttcctcccctgaatctcacagcggcgtatcgctccctttggtatgctcgttttggtaagggttcctccatatccctgccaaaagtcatggcactacatcgccggggaagcatatcccacacaggctggtcattcgattggaataatccatcgatgaactacctgtatcatagaacatttttgtgccctgtgccgtatgtccacaaagtaggaattaggagtaaaaatcagaaatttccacgattgcggaaagtgtgatataatccagttaagcggcagcaatgaaaccgccggaaaggagtgtgcgcccatgaaaggagcaacaagcatacaggaacgcctttgggaactccgcaaggacaaaggcttaaatctggaagaactatcaaagctgacgggtatttccaaatctgctctcggaagttatgaaaaagaggattttaaggaaatcaatcatggcaaccttatcacgctggcagacttctatggggtttccgttgattatctactgtgccggacagagaacagggagcagatcaacacgtcattgacggagctgcatttgaatgatgagatggtagcacttctgaaaagcagtcggattaacaaccgtctgctctgtgagcttgccacacataaagattttatcaagtttcttgcagacattgagatttatgtggacgggattgccaccatgcagattcaaaatctcaatgcacttgtcgataccgtccggcatgaaatcattgaacggtatcgccccggcgaagatgacccgcatttgaaagtgctgcaagccgcccatatcagcgatgatgagtattttagtcacatggttctggatgacctcaacctcattatccgggatattcgggaagcccacaaaaaggacagtgagagtgcaccccagaccaccgttgccgatgaactgaaagaaaatctggaagcggtcgaaaatttcaagggcagccgggatgaaaagctggttgtcctttactgcaagcaacttggtatcaactataaaaatctgtcagatgaagaatttcgctggctcattcggattctcaaaaaatcaaagaaaatgggaacgcctatcagccagaggaaaaaacggtaaaaaaaaccgctgttgcatggttggggtgccttccatgtagcagcggttcttgctgtggttattatttcattcgttttcttaatatccggcgataatttgtttctccctttggtgcgtcctgtataatttccaacacaccatcttcaagcattttatcaatgcgattagaaatccatacatcactaattccaagttgatattttcctaaaacattacctataacaatagccattttgaattgctctggctgttccgcaatttcacgaagaatgaaactatcatatatatcttctgaaacactttgcaatttaccatttagcattgcacgcaaaggtgcattttcattttgaagttgattccatttcatagcacaagctgaaagaaatacaggcttagctttttcttgtagagttatatattttccccattcgccaggagaaacctcaccccatgctattttggatgtcatagtattttcttttccatattcccaggcaggtaacttaaccaaataaattgttgtctgacagtttaatggtcgaagttgtttcataagccagtacataccgcaaagttcatccggattatagctataccaaatacgaacttcttccccagctacatatcgttcaataaccgaagacaatgtagttttaattttctgtattttttcttcaacctgatagtctaaatcctctacaaaccagacagacagcattttcttgagaacatttttccgctgttcgccaattccattatcagaaatatctcccacactaagagccatatcaaaacaataaacatcactgctcttgcctcccaatggaatagcattctcccaagcaatatgttcttgttcctgtgcttgaatttgtgcttctttcatttcatctgaagatggaacactcccatcttcgtgcctcataaagaccgaaactgcacttcctctatactttcccttaccgtaagtttgggcaattttcaaacttccacaggcactttcaccaaatacaatttcaatcatcttatatacctccgatttaattactcccgtatgaataaattatatcatgcaaaacaatttcttctgctcggttgtgaatgttattgcaacgctgcacccattccatttgacgggtacgcttcaattcctcggtcacgccctcggtggctttcatctgctccatgatggtgtctaaccgttcctgtgcctgttcgttcaggtctgcaaggtatgtccataactccccggtcaaggtcaatgtgttcaatctggctgggtggacttctcttaaatattcccggtgcatccgtccgtactttccgatggggcggtgttcttccggcagcttcaagtctgggatgtagtaatctccaacaaggatataatcaattccgttttctgttattcttggtttcaattcgctcatgttccttacctcctgtggaagcaggctcgtctggtactaactcaatcacatcggtaatctcacaattcagcgtttcgcagatacgggctaatgtgtccatgctgatgtgctttccctctttgctcatgttggcaatcatattcgttgtcataccggcggcaagccttaaatcttcttttctcatatcacgctctaacagtgtatgccagagtggtttatagctgatgtgcatattgctttcctgcctttctatccataccaccggggcggctgccccggcaggaacttttctcttattatagcaccaatcttgtgtaatcacaatttattcttgtaacctgccgctgataccgtctggattgtgcttttcctttctttttgctccctttaattagccatgaactgcttaatgccttgtgattttgcacccggattgtcgtttccatatccctccaagagattgataacgccccaaatgcctaagcctgcgcccagtgcgataacaagggtctgtaatacgtcgatagcagagttaaaaaattccataaagctcctttctgccgcaaatgcggcttgccctataaaagggcataaaaaacggcggtcagttttgtaactgccgcggtcataagtccccgcgctgcttatgtgtctgccgcgcggcggtattcagtttttaagtgtgggcgttatggattttccagtaggggcgcgtattctgtaagttgtctgtttctttgttactgcgtcaattcctcctttcttttcagccgggaacacacatttttcgtcattccaaaagatagctcctacgctgcatatactcggtaacgtaaagggtctgttcccctccgcgttcctgcaaatactcccgcagagcgttttctgcattttctatcatctttgtaaaataacgttcacgacgtatatcatcagtttttgttttctgtctgctcatagtataacctcccgtaaaatcaaagttcccgccgcacccgtttctgctcatacagggcttcacaccgtttcacaaactgctggatagctgcctgccgttgctgttcccgtcgctcggcaatgaaaacaagcccgtttatggcttctgtgattttcttatcttttttcttctgcatacgtctattcatggtcggtgtcctcctgcaaatctgcttcgctgatttcgtaatagtcaaagggttcgtccggctttacaagggcgggtctgcgccttaaatgcttttccatatcaaaggtatttttcttgtcatagtcggaaagatatttatagttggggtgctttgtaatgtcgtacttatcagagaagaacgggcgcaccccgcgtagctgtaagatacatttcccgccgtccataaccgcaatttcatcttccgtcataagctgcttgcctaacttctgatagttcagcccatgcgatacctcccgcccccggttctcggaagtgttgaagctgtcaatggtttctttccccaagatttccgacatttctttgagggtggttttctcctttccgcctaagaaaagggtggtgtcgcagttgccggctatggtatcggcgttgtccttgtaaatggcttttaactgcgactggctctgcaaaatgattgaagcggagatttcccggcttcgtatggtggctatgagcttttcaaacttcggtatctgcccgatatttgcaaactcgtctaacagacagcgcacatggacgggcagcctgccgccgtattcatcatctgccttgtcgcaaaggagattgaaaagctgcgtgtaaagaatactcacaacaaagttaaatgtatcgtcggtgtcggaaatgataacaaacagggcggtcttgcggtcgcctatggtgtcaagctccatttcgtcggtttccataaggtcgcgcagctccttaatgtcaaagggggcaagccgcgcaccgcaggaaatgaggatagagcttcttgtctttcccgcagacagcaggaatttcttatactgccggacggcaaagtgttccgggtctttttcatccaaccgttcaaacatgaggtcaacgggggactgaaattccgggtcgtcctcgcgggcttcactggcatttatcatttcaagcagcgtcgtaaagttcttttcttcctccggggcttcgtaccaaatgtagccgataagggcgcagtaaaagagccgttccgattttacccaaaaatcctccccggctttttccccgtcccctttggtgttggcaatcaaggtatttaccagtttcaaaatatctttctcgctgcggagataggcaaagggattgtatttcatgctttttttgaagttaatggtgttcagcacctttatccgatacccgccccgctgtaagagtttcccacattcgactaaaaccgttcctttcgggtcggttacaacgtaactgctgtgcatttgcattaaatatgaggtaggcaccctgcgccttgctgactttcatcagtaggtttcagggagccgcctcccaaaccggacgtacacctctcagcgtatccggctttccatgaatcaccttgattctttggtttcgtgtaagagttcaaagcagtcagggcagagagccagagattttcttctcattttcagcattttctgctcaaatatatccctgcctttcagcgatttcagcgttcttacgtggtgcatacataaatagtctgcatgttccccgcaaatctcgcatactccggcttttatgcggtttactatcgtgtgcctgctgtcatatttcctataactcggcataacgtctgccacattgtcatagccgtcgctgtgctttctgaatccatcatggtaaaattcgcagtatttacgtcccttagttgtatcgtatgggattctcagtactccgtttaccatgtgccgcttcttaataacactgacattcgttctgtgctttcctgccagagtttttaacatgctgtaccgcaccatgtagtaatacttgtgcaatgcgcctacgttttctgctatccgatagaagttatataaccctcgaatttcggaattgaaagtagacacaatctctgcatcgctgcggttcatcaggtctttccttggcataggacgccacatttctttgcctgtgtcattgttgcgtttcacctgtatcgctccccgttccatcgcttttttaatccatttttctttcggcatatacaggaatacttttccataccacacccgtttcatgtcgccgtttttacaacgcttcatgttcttggaatggattactttgaaatcgtaccccagatagcgtaccggcttactggaatgggtgactttcgtcttttcctcggacatttccaaatgcagtttttcttggagaaagatttttacatcttccttgattttttctgcgtcctttttggagccgataacgccaattacaaaatcatcggcgtaacggttgtactggattttcttgaagccttcctcaaacggattgtaatagtgctgattcatcttcttccttctggaatccttaaattcttttaccagttcaggagttgatttttctgcgcccattaacgctttacgtgcctttctgtatctccgggacgcccgctcgtattctctggtcgtccttctgcgttctggctcgcaatcatacttttctttgtattcctgcatatagttgtccagttcgctgaggtagatgtttgcacatatcggactgataccgctgccctgcggaacaccggagtaggtgcagttgtactgccattgttccatatatccggctttcaggaacttccagattagaccgataaaagcctcgtctgaaatccttttccgcagtaattcaaccaacacatgatggtcgaagttatcaaagcacgccttaatgtctccctcgacaatccatgtaacacctgtgaagtttttcttcacttgcgtaagtgccgtgtgacagcttctttttggtctgaaaccgtgtgaattgttgctgaatgtcggctcatagattgcttcaagaatcattctgaccacttcctgcactaacttatcatcagtagaagtgattcccaacgggcgaagtttcccgttctttttaggaatgtactttctttttgcaggctttggctgatatgtcctgttgcgtatggattcaataatccggttaattctcggcaggctcatgttgtccagcgtctgcccgtctaccccctgtgtcatgctcccctgcgatttcgcaatgttcgcatatgcaaggagatagaactctggattgtataggttgcgatataatctttcatatttgttgttacttacacttgccttttcttcaaggcttttcaagacatgaatcggatttctcatagtgtctcacacaccatcctttctgttttgaaaatgattcactgttcccctttgccatgtagacggctttcccgtccgcagactactatgggaactctgttgccatggtgaatattcagaaccccgcatttcagcgttttcatagcctttcggcatttcactttaggcaatccccgtttagtacggtataaacaagcgttccacgttgtcggtatgtgacgttcgcctttttccactttcccgtggctgaacctgctccgagtatcagcagccgcatagccaaacaatgcgactgtcaggaacactgacgagtacaacctctctacgtcaggggtacgctcttggtcccgatttcaggctgtcattcaagcagtctagcttccatcctcatacgtggattttcattccgtcacgccggcgcttctgaggcttcagcgccccgtgtcctccgtcatgctatggtcgccctccggtttcccttttggggtaagacggggaatgataggttgcggcacaatgccgcttgatacttttacctactacttgctcaaggtaggatttataccgcccttacgggcgcactcggcttcacaaaaaatctcgtcttgccgctgccgcttcccccgataacaaggatatttttattccttgcatacttcggctgctttgggcggctgttcatggtaagccgttccgtctgtgtgagcagcacgttattttgaaataccgggtcggtgtagggacgtatatcttcggcatttccccatgaagcgttttgtcaagtgcttttttgagttattgacgcaaattatcgtgaaagtgcgaaagtgcaaagtgcaaagggtctgcgttttgcactttcagcttgcgggttcgggtggctgcttcttcttgatgaagttgtaccattgaccgctgacacgctttgcacccaaaacactgcccatgttacgcttggcgttctgcaccgtcctctcggatattccggcgtcggctgcggcttttacaatgtcctcgctggcaagctcttttccgtctgcaagcaggtcaagtatcagccgttcagcctgttcggttttggtggcgttgttgccgcccgcgccggacagcagttcgtcggcggtgatgtcatactcgcctatccacgaaaagcctgtttccgggtcaaggcaaaaggctatgggcttaccctccggcgcaagggaagatttgtcatggacgataacgcgcacattcggttctcgctttacgcgcccaataagaagcacgctccgggcggctgcgcggaagtcgatagaacctaagccccggtatgcgctctgccctccggcagctttgttgagatgtccgataaggataacggcgcacccggtacgctcggcaacatcggcaaggcggcggaacatggggcgcacttcgtttgcccggttcatgtcggtcttttcgcccatatacgcctgtatggggtcaaggataatcagccgcgccccgttctgcgtgattgccttttctatgcgctcgtcggagagggtaagctcccgcttggcttcatcaatcacaagtacgcggtcaaggtcggcttcggcttctatcaagcgtggcttgacggtatctcccagcccgtcctcggcggtctggtaaattacttggaacggcggcaagggcttcattcccggcagcgttcccccggtggtgcaggcggcggcaaggcgtagggcaaaagtggtcttgccctcgccgggattgccctgcacaatggttactttcccaaagggaatatacggctcccatagccattcaacggtctgtgtgtcaacctcgctcatgcggataatctcaacggtttcttcctgcggcggctctttcaagccgtagactgcttcccgcaaatacttcccgtctgtgatttctgcccggtgctgcaacacctcgttccagtccttgtaaagcgggagaaggcggtggacggtgtagccctccggcacaagctccgcaaggcggctgcaagcatcgtttccggcgttgtcgctgtcaaggcagaggtaaacggttttgatgttcagacggtcagaaaggaaacgcaaaagggctttttcgcccacgccgcccaacgccagatagctttgcttttgccaatcctttttgaacaggcagaggaaagataagaggtctatcggggcttcaaagacaaacaatctttcgccctcgccacggtagcagaagttaaaggctttgtcgctgcctttcacatcaagccggaagtttcccgccgttcccttgctgtgggcgtagcgcggtattccgtactcgtcccgccccacaaatacggcgttgtggtgggctgcatcctcgtaaatatcgccgctggcaaagaaaaagtccgacacatcttcatcaatgcggcgggcggctgtgaggtagttcctcgctgttcggttgtcggggctgcggggcggcagccggaagtcagaaaaggacgcggggattggtctgtccggcggcggggctgcgcctttttctcctgtcagcatttcaacggcttcggtaaagctcttgccgaaaaactccatgacaaaatcaatgggtgcaccgcccttactctggctgtgcctgtaccatttgtttccccggacggtcaggttgtcgtgccgcttccagcggtattcatttccggcacgggtaagctgctcgtcctgtgattgcaggaaagaaacaaggtcggcttggttggcgcggtctatctgttcttgggtgtaatacataaaagttcaactcctttcagcggtctatatcatgccgtttggtgcggctctgcgtctgctccggttggtcggcgcggagtgcaatatccacacacctgcggattttttgaagctcggaaacatcggcgcgggtctctttcagtttggtataatcgctgtccctctgtgttttgaggtcagcatattcctgttcccattccgcaataggcaaggtctttgttcctttcggcagatttgcatggagatagcgacttgctgcgttccatagggtcagctcggcgcggtgggcttcctcgtacttgtcgcgcttgtttgtccagccgttttgcagctttttcagctcatcgtgaatgggcttgtactctgtatagttcttcccgtattcaattagcttttgcagcttcttcatgcgttcctcggcggttttcattccctcccggattgaataggctttatcgctgacagaagaaagggaagcgtccagctcatcaagattagagataccatgctcggaaagatagttgaccgctgccgctatggttttcaattcatcggttgcgtgctgctgttgccaacgctgcgaatacttccggctcttttctctctgaacgctcaaatacttcatcaacagatttgcaaggttgggagattgcagcggctgctccgtggcggtttcccgcgctttgaacaggtcggcaatccattctttgagtttcccaatctgcgcccggatttcccggataaggcggtttgtcttttgaatactgcggttcagttcgcctttctcggtggcgatacctttcttctccatctggcaagccgccacgcccatgtggacggtgggtatctcgtcaatgccgcgctcggcgttgctgcggtggtcgatgcgctccgggcttccgttcctctccaaaaagtcgttggtaaagtcagcccatgccttacgccacaagagggcgttgcccttgtcgttccagccggtcaggtcaactttgtgcgtcttgcatctgccgcttggcaagcggatacgctcgccgttttcatcaaggtcatattcctttttggacttcgccgcccatgcgccgcgctcgtcaagggggcgcatggtaagcatgatatgacaatgtgggttgccgctgtcggtgtcgtgaatggcataatcaacgcacattcctctggaaacaaattgagaggaacagtattcccggacaagccggatctgttcctctctggataattctatggggagcgccgcgtcaatctctctggcaagctgggcgttcccggctttctcgtaaagctccacgctgttccacaaggttgaacggtcagagaatgagggcggggcatggggcggcagcatgatttctgtatggacaacgccgcctttgcgagtgtagtcatgtgtcattccgtcccattcgtttgtcagcttttctccgcttcggtaggcggctgcggcaacggctgatttgccttttcctcggctcacaatgccgatgttccaatggtaaatggctatgggtatcacctcccggataggataataaaacccgcaaaaatggtacagacgccaacggcgggtgtactgtttttgtgggtgtgcagggatagccgcgaagcggcgcaaggggtgcagccccttgttgcggcaaagccgccatatcggagcgcggggtaaaatccctgtgcggagataaagccctcggcagagcgcacacgcccgtaagggtgtataagtgcgccctttgttcctaagggattttcagcttgtcgttcccccggctcgttttttcagatattcccgcgctggttcactcgtcaaggcaagccggagaagcgcggcagcttcctcgtcggtcatgtcctttgcttccggcacaatgctctcaaagaccgcgccccggacgataaggcggtggctgcgcgttctgcgttcctctttggatagcttctgacgcaacatcttttctcggttctcaaactgccggattttcttctttccgtcctcaatctcggcttgcagctcctcacgggttttctctctcggttttgtcatagttggtcgctcctttctgcctgtcggcgtagaaaaaggacagtcgatttctcggctgcccttttggatgggtattaagttttattgtgtgctgttttatcttacccttattgttttgacactttacttaaacgggatatttcatcatcattattcaataatcgtgttgatagcagactgtaccgctttatatctcccctcatttgagtgtgccgctaaacaggtaattaaatatgcttttccatctttttcatacagaacaacaatgttataggaagatgccattgttcctgttttcattcctttaacatttgcattatagtacggtgaattttcatctaaaaattcatttgtatttttccatgtaaattcaccttgcggagtttgaattgaaaattcgctttttccaatacattctttaacaaaatcgtagttaaggagcttcaacgctacgcggttaatgtcatctaaatgagagtcagcttgcatagacgcgccacttgggtcattatataaatttgttttggaatagcctgcttcgattaaatactcactaagttctgtcatgaaataatctatatattccgttgctgtataaccttcgcctaattcgtttttagcgatatgatatgccaacgcataggctgcgtcatttccggaaggaacaagcatagcctccatgatttgtttaactgtgtattccccagcatacagatttgctaaagatgaacccgccggaacaagttctaatacctcttgatttacttcaacaatatcttccaaatctacttttcccaaagcataatcaatggcaaatagttttgccaaacttgctactgtgggaagttggctatcgccctcgtaaaataaatattcctcctgttcaatatcataaacagaaaatgaaagagcgtcctgcggaatgttaagctcgttcgtacttagttgaaaatcaatttttttatagatgtcctttaagaaatcaaaacgataaatccctgttttgtgtagcccaattactgcaacaaatgctataaacaacactgttacaaaagctattatctttttacattttctatgcttcttcatattttttctcccacgaatttatatctgccattctgtgcctttgagaaaagtatagcacaagaatatgaacaaatccacattatttcaacaagtttgtagtgctgttttctctggcatatcgccgcgttgcttcccgtcgttcctcgctgtatggggcggtcagacggaaagagaagcgccccttgcggatttcaaactccatgcagcccgtgtccgggtctgcgtcgatctggcggcactggtcggggtgagctacggcgtaggcggtcagcctgttcttgaggtcggtgttgtgggtgcggatatggataagcgggtctttctcgtcaaaccaaatatcggtggtcttttcctgcttcgtaagccctgttctcataaactctcctttctgcgcccctgttacgcaataggggcatttttcgggtgtttttcccggctcttgacttggggaaaatgaggattttcaaatagaaaccgcccggacagggaatggttcgtcggggcggctgttatcgcaagatttctgttttttccggctcttgaccgtcagacgcggataaacgcgtactgtcggcaagcaccagtttgagcagcttgtcgcggaatgtttctgtgctgctgtgattgaaaaataactccgcaacaatggtctgcccgttcctctgggtcgtgatgatattgtcgggggtctgttctgccataggcggctcctttctccgggtgcaaaagagggatttcccgtaactcggaaaatccctcttggttgacggttattctgttttactgtgtgggctgtgcggcggctgcctgcgcctttctccttgcccggtattcccgcgctttcatgcggtcatactcccgctgcttttcaaggtttcgcgcccggtactcccttgaatactgccggtggtaggcgcggctcttttcctttttggcttcttcgatttcctcccgcatttgccggatttcctgctcggtcggttccgcaagctgtgtcacttcattctcaaacttgccgatataattgaaatatatgctgatgtgctggattgcgtatctcgcccttttctggtcgcgctcatgcacttcaatccggctgataaactcgttgagaatggcgggggtaagttcggtaaaggcagcatggcgttccgtcagcttcaaaaacttctgcgcccgtcctcccgcgttctcataagcggacagctgctcttggagcgtggcaagctccgctttcagcgcatagtattcttccgaatacttctgcgacatctgctcataacggtcttgtgggatcgtgccgagggcgttgtcctcatagagcttattcagcaccttgtcaatctgttcaaggcgcgtcgtgatttgcggaatacgcttctgctgtttcttggtctggtcggtctgctgcatgacaaggttctttttcactaaggcttcaaactccgcccggttgctgatagaatagtcctcgattttcttcagcacttccgcgatggtctgcatgagcaagtccgcgtccatgatgtgcggggaatggcatttggggttcttggctttccccttgtggtactcgctgcaataggcaacgtgccgcttgccgccgtttcggtaatctatgcgaatgtgcatttttgaaccgcagtctttacagaaaagcaagccggacagagggtggatttccccgtccccgttggggcgtttgacaggcgcgttttccaaaatccgctgtacggtttcaaaatcgctgcggctgataatcggctcatgcacattttctgtgatgtgccattggcttctgtctacatagtggttgtgcttgtcccggaaatgctttgtggtcttgaaattgacaacatcgccgcaatactcctgccgtgtgaggatattggtcaaggtggctttgttccacttgcagcggttatcctcgcccagcgtcttatttttacaagttccccgcccccggtctttcatatagaaagtgggggtagggatttgctcgtttttcagatgcacggcgatttggttgcggttcttcccgccgataaacagacggaaaatcaaacggacaaccgcggcggcttcctcgtcgattatccaaaaatccttgttgtccgggtctttgacatagccgtaaggggcttcggtgacaatcggctttccactcatgcctttggtcttaatgcccgttttcactttcttgctgatgtcctttgcataccactccgacatgatattgataaagggcgcaaactccagcgtgtcgggcttctcgctgtctatgccgttattgaccgcgataaagcgcacattgttccgtcggaatatctccatcgcgttgccgacttggagatagtcgcgcccccagcgggtgaggtctttcataatgcagacaccgattttcccattttccacatcgtccatcatgcgggagtaggcggaacggtcaaaaaatctgccgctttcgtcatcgtcgatgtagtgccggatattggttaggtgctgccctctggcatagttctccaaaaatattttttggttctgtatgctgttgctctcgccgccgtccctgtcctcgtcgcccacagaaaggcgggagtaaagggctgtaattttgctataatcagtcatgtgcataacctcctgtgcgtccatgtaggtgtcatttacacttaaaattatgcactccaacgggcagagccgtattccacacctttgcggtatttcttcgcgttcttgcctttgacatagacaatcagccggataagtaccgcgccgaaaagccctgtcagtaaatccataggggcaaggctcggaagcggatttgcaaaggcagcggaaaagccgtctgcaagggaaagcaccttgccggacaggtcagcccccggcgcaaggcgtaccgcctgcccgactttatcaaagagatacataaagagcagatagggaatattgggaagtatcagccttttccagttgatagcgttcatcttgcaatccccctgtctttgttcttgactttctcccgctgtgcgttcaaagctgccgccttttctttgagggaaacaatcagcttgcggatagagggcttttgctcctgcgtcagcttctttgcggaaaactccttgaaagctgcggtcagtgcgtccgcgtcccgtcccttaaaaaacacaagatagcggggcggggtttcggtgctgtctttctttaaggcaaagtcaatcccgtattttttcgccgtactctcaaaggctttgatattctcctttgtgatttcaatgttggaaacgcccgcgttctgcttcataagctgctttagggtctgcttgccatgcgggattttctgtttgtcatgctgctttttcatctgtgcaagcagggctttcatagccttttggagctgctgcgcggtcagctttccggtcttgatgtaaagggctatggtcttttcgttggtttcctcctgcaatgggtgtcctcctttcgtgttctatggtggtatgcccgccgccgggaaacgggacgggcatgaaaaaagagcatccgctttcactccgccctgttaaatccgtacccgcagcccggaaaggtctgccgcccgaatacccacaagataccagttgtccccgtactccatacgggtcggcttccatttgccccgcacaaagacctccatgcagtcgccgcaatgcaatcccccgtaatagtcgtttacgtcaaagcgaatgtcgtagcggtcagcggtttcatcaaaaatcaaagctcctgttttctgtgtcatcataaaatcctcctttgggttggtttacaggctttcgccctcgttgcaggtgtaatcgggtatgcccttgcttcttgccgactggatagtgcgcccgccgtacatatcgtgagatacaagggacgtgtaatagctgccaatcgtagacggagcattgaaaagggcagctttcatgtactgcttgatgttgcggattttggtggtgttttcctgcatacagtccagtacaaagcggatatgttcgctgttcagtttcataaattttgcttttacaagctctgccgggtggtcgtccccggcgatacggattgttcttcgtttggtgcagacggtttcaagaataagggcaaggatttcctctatcctgtcccggtcaaggtatctgtcctgtatcagatagtcgtactcgatattgtccttgatgatttcctcatacacgctgtatgcgtctgtcgcttcctttcgcttccgttccggcagctgtgccgcgtcctctaagggagagggatttagggaatggaaaggaatggaatgggtacttgatatatctgtatttaatttttctttttttggtaagttagttttttgtatctctttatttaattgcgttggattttccgacgtcgggttatccggtgtcggattttccaatatcggcttatccgctgttggattttccaataccggacaatccaatgccgggggctgtggctgttcgtaaatggtgtactcaatagcggtcattttgcctttctcgtcgcgtccctgccgccttgtgatatatccggctttttcaagctcccatacagcggtgcggatagcgtcgatactttcccggttgataagggacagccctgcaagggtgtagtcccaatcttcgggaagtgagagcatttgcgacaacaagccctttgcctttagggaaagttccttgttgcgtaaatggtggttgctcataaccgtataacctttgttcttttccacgcggaaaactgccatagcttcatcactcctttggttggatttgttacgcagtagaaacgcgattttgagggaaaaggtatcaacccttgcctttctcatttccgcgctctaagagccgcataaatcaaggctttatttgcccttactgcgtaacatgagggcataaaaaaagcagcgttcctgttctcctgtgtgggagtgagaaacgccgccttataggtggtgcttattttattttttcttttcgacgtgccgcgtaaggtggtgtagtggtttatccggcagcttcgcaggtgcttttgcatatcaaggctcaattcgttaaaagtagtaaatgagtagtaaaatcaatctgcaaacctgcgaatatgcctgtaaatcaagcatttttcaagacaatcaactaatttaaagtgaaattctatgcaggagtacaaatggattctgacccggcagcaagtggaaagactgctactagaaaatgggtgttcagaactgatgcagatggatttgcatactatgattctcaatatttagtttcaggggatgaattatataccggaccaactggaagtaagcaattaccacttggtactcttacaattcaagaaacgcaagcaccggaaggatatttaatcaatccaactgtatatacggtcaagatcacaagtggaaataatggttccgagtttgtctatacctacaatgaaccaacaatctcagagcagtctttggatttgaacattgtcaaaaaagaaaaaggaaaagattatgcgattaaaggtgctgtttttgagcatacaaaaccagacggaaccacagagactgtgacaacggatgcaaacggagcatgtaaattcaaatcattaggctatggacagcataaagtacgggaagtatccgtaccggatgagtacactgtaaacagcggagttgtaacattcacggttgaaaaagacaatacaatcactttgaattccaatacagcaaaggataattccatgcggtttgaggttgaaaaagaaggaaccgcacgtttaggtgtggaagataccttggctccgtatcagctgaaagtaacaaaagtcaatgaaaagggaaaattactggaaggtgcagagtttacgatctacgaagatgctgactgtacgaaagaggtatccaaggttgttacagatagcacaggtgttgctacaaccagtccattagaagtagagaaaaagtattacattaaggaaacaaaagcaccgcagggataccgaatcccaaaagatgcaaagggaaatgattatgtctatgagatctataccaagatcaatgataagagagagtatgaatactatgtaaatggcgaactccatacaaaggattccggggattacgcaatcgaaggaaccccacatgagcgaattgtgaatctgaaggtagaaaaccacaccggattacagatgccagagaccggaaatcatgcaacgttaatttttattgtgcttggacttgcttgtatggctgcagcgataatccgacagatgaaaaaaggaaatacgaaggagaaagagaatgagaaaaatgacaaaatttaataagaaacgagtaactttcatgttaacaggaacccttgctttagcaggtgcgatcagttccattccagtaccaatgcttgatcatggaatgtctgcgattgtctatgcggcagatggggcagagtacagtaccgtgaagggtgttgctacgatgggaagtggacaggctcacattgatattgctggaaatgatggacagacactggttggaaagcagttcaatgtttataaactatttgatgcagagaatgcaaaagatggggaatccatcaattataccttcaatccggcttatgagcaggccttaaagaatgtcgtagcaaaagcactgacaaaggcaggtacaacaatcgcagctgcagatgtgacagaataccaagtcatcgattatatccagtccttaaataactatccagtggaaggagctactacagatcagaccttagaaagccgttacagtgaattccgttacttcatcgaggaattaagagatgagatggtgaaattaaatgaatcaccggaagtggtcaaagtaaaaaatgttcgttccgataattccatccgtctggatggactgcagtatggttactatgtcattgacgaagtatccaatgtagagggaacacattccgcaagctctctttgtatggtaaacacagcgaatccggcagcacaggttgtgatcaagtctgattatccaagtgtaacaaagaagattcaggaagatgatgccaatgaaaatattacaaatgcagacagatggaatgacattggtgactatgagattggtcagactgtaccgtatatgtatacatccaatgtgccggatatcaatggatatgatacctattactatgcatggcatgatgtgatgaatgacgcactgaccttcaataagaagagcgttaagattgaaatctccggaacagtagacggaaaagataagacttatacactgaataacggtgagtttgtagtaacagaaaatccgggaaatggagatacttttatgatcgcaattgcagatctgaaggcaatcgtagaccgtgagtttgatgcagtggataaccgcaaagagaatacttacggccagaccgttacacttacatacaacgcaacactcaatgacaaagcggcagagaatacaggtcgtccgggatttgaaaatgatgtacgtcttgagttctccaatgatgcagattctgaaggcgaaggaaaaactggctatactccatgggatacggtagtctgcttcacttaccgcttaaatccaatcaagaccaatgaccatgataaagttctggatggagcaaaattccgcctgtacagtgatgcagaatgcaaaaatgaagtctatgtgaaaaccgggcaggacggatatattgtaatcaaccgtgattcccttggtggcacagaccataccggtggtacaaaaccggacacagcagtagaaatggtatccgatgcaaatggtacgttccatatttacggacttgacagtggtacctactatctcaaagagacagacgctccggacggataccgtttattaaaggatccgatcaaactggaactgaaagcaacatttacaacagagcgtgacagctatgtcaaaggggatggagcaacagataaaactcttacagcatttgatgcaaaggcaaatattaagacgttctataacggactgagtaagtcagaagacaagacactgacaaccgatgttgaagagggttccgcaaatattacgattgtgaatcaggtcggaaagaaacttccaatcacgggtacatcaagcgtagtcattctgcttggtgcaggtgttgttcttatgagtgttgcaattgcaaaaggacgtaagaaagacgaagagatctaagccaaaaggaaaggagattgcatgagaaaaaaatggagcacagcagttctattcattcttggatttgcactctgttgtcttccaattatctggaatgtgatcgagcagcggcatcagtcagatgccgttgctacttaccaaagtgcagtaagcaaaaaagatgatacaaaacttgaggaaatcatgaaccatgcgattgcttataatgacatgctttaccagacaggaggagcaatcgtagatgattccgataccgagatcttaagtgatgaaagctatgaggaacagctaaacatctcaggcaatgggacgatggggagtctggatatcccaaagatcaatgtggaactgccaatctatcatggaacggatgataccgcactgtctaatgggatcggtcatctgcaggggacaagccttccaaccggaggagagaatacccattgtgtgctgaccggacacagagggcttccaagttcaaagcttttgatccggttggatgaaatgaaggaaggagatctcttctttctacggattggaaatgacacgcttgcttataaagtatgtaagattcaggtggtagaaccggaagatgtttctgccctgcagatcgaagccgggcaggatctagtgacactggttacgtgtacaccttatggaatcaatacccacaggttactggtgactggaaagcgggtggaatataagaaagcacagcatgatgcaatcaagcaggaacttccgtctgcaagggaactgatcttcttttgtctgccatttttgtttgctgcagtagcaatcggattgtatttatggaacagaagggagacatatgaagatggtaagatataagcggcttttggccgctgtgtgtgtatttgcagctcttagcgtgtcaaccgtaagtgcggcagatacagcaacattaaacgagaatgatctggtgatcgataaaacaacaaccgaaacaggagaacaggtcttgccggaaaaaaagaacttagaagaggtagaacaggccagaaccggaagtatcgaggtagtccttaccgatggaaaagccggaacagacaaaagcaatgtaaagatccgatgtcagaaagtgtcagagatcgtgcatggagaatacgtgctgctcaagtcctataaagatgcaggggtagatctcaatgcgattgaaaactccaatgatcttaaaaatgcagcggagcagctactttccaaagcagaagaaagcacgaatacaaatgtgacagatgcaaacggaacagttacatttaaaaatctggaagtaggtgtgtatctgatttcggcggaagatagtgaaatgtatgatacggtcgaaccgtccttgatcgcagttccaacctggagtgattccgagggggagatgcagtatgatgttgtgatcgaaccgaaacatacagaaaagcaggacaaggaagaaaatacagctccacagacaaatctggaagaaaatacatggagatatgcaggccttgccggaatctgcgtggttggagcattggtatgcatcatcagaatgcgtaagaggaaatcttaaatgagggacagagtatacagatttcttatcgtgatcttacttggaatggcggtattttttggtatccttgcataccgggaacataaaccatttctagaagcgaagatcagtcatgaagcaatcaaaaagactgctgtagtaccggagagtgatgaggatgcattcgatccaatgaaccggagaattgattttgcactattaaaagaagtgaatccggatatcatcggatggctctatatcccgcagatcggagtggatgagccaatcttacatggcaaaaccgatagggaatacttaagcaaaggatttgatggaaagtacagtatcttgggttcggtatttacttttgcccatgcaaacgaaaagctgtcagatccacatacctgtctttttggacataacatgatgtccgggcagatctttggaagattagatgaacttacagtggatgagaatggagcacaaagtatttatatctatacgccggagagaaccaagggacttacgatcgtgtctgtatattcctgtcataaaaaagatgcggtatttcaggatgactggaaaatggatcaagaggatgtgcagacctttactttagcaacctgtaccggatattcaaggactccgtatcgtttggttgtcaattgcaaagtaacaaaagaaaaactgatcctttagagggaggaaaaaagtgggatgaagagagtaatcattaccatcctgatctttttatttggcatcggctgcggctttggtgcattttttatgctcaaaactggtggagacatgaaacgggaagaactaaaaagtgtacagaatctggaagttcaagaggtcgaaaaagaaaatgtaccgaatttcggtacaaaagaaggcgaagaaaaagaggtaccgaatttcggtacgcaagaagaaaagaacacagtagaagaaattccgagtgatcctgcaccaaaaacaggggaagaaaacaagatatttgttttttctgttttattaggtatgtctgtggctgtgatcggagggacgatttctgcacgaagaaagaagaaaggagagaatggaacattatgacaaatgaaacaaatcaggatccgctttaccggaatctgaacgagatctatcaagaacgagagaaactgtttcagcaaagagagcaggattatctaaagcagaaaaatgcattaaataagctgcttgaatcaatgaagcaggaaaaagaaacattaaaccaaaaagagcaggaactaaaacaacaacaagaggcactgcatatagacgaacaaaatcagcaatctcggtatcagcagctctgtgaggaaagaaaacagcttgaacatgacaaagaagaactcaataaaaaagagcaggagttcgaagcagcaaaggactccatggaagtacgttatcaggtacagattgaaaaagctaaaaatatggagatccaggcaaaacagacaaaagaatcatttgaacacaagttagatatgctcggacttattttagatgctgatggaaagccgggaggagaagcaacccagttttttgaatccttacttagtggaatgaataaggaaaatgaagaagatctgcagagccttgaaaaggagaagaaaacctacgaaaacgagaatagatatttaaaagcggaacttgaggagttaaataaaagaaggaaacaactcgaagaggaaaagaagcaacttgaagaggaaaaaaatcagctgcaaagtgaaaaaaaacagctttcagaagatgttaagagaatggaagcggaaaagaatcgtctgttagctttagtatcaagcatttcacagaaaaagaaagaggtagaagaaccggaaagagaagaggaagacgtaccgaatttcggtacaaataaggagaaagaggaagacgtaccgaattccggtacgcaggaagaaaaaaatgtaccgaatttcggtacagaagaaacttacattccgacttttggcaggaaacaggaacagcgtgagttacagcgagagaaacctgtatttgaagaactgacagcatctattttgaaccgatatctggctagaaatgagccaaaatatatctcttccgagatcagacactccgaggatggcgaacagctgcatgtaaatatcaacaatctggattatgttttcctgttttcacagccagcagcatttgatatttcatccccaaagaagaaaagcagagcacttgataagcttcttgtccgcttgaatacacagcatccgggagtgaagttttattatgatgaacaggaacacagagtttatgcttccggatatttcagtaacacaatgtctccggaacggttaatggagaaagtacatgaagtaagtgactgtttccgtcagaagtagagaggtgagtaccaatgacagctttacaatatatgggaacaggcattgtttttgcgttagttgccggagtttgttttgtaggagcaattatctatctttttcttacaaaacacaagaagtatctctatgcagaacgcttgggaaaaataaagtttcctaaacaattctatcggaatctgcggagactgtatgaaaagacagaaagcattcctcagacgttggatcttttgttggagcaatatccgaaagggcaagtagcaaaacgtttacgtgcatccaaagattatttaaagaacagtcattataaggattatgaaactgcgctgtatcgttatttatcagatagtgatacggcgaatgtgattacagatatattgatcaaggatatgcagaagattcggaggattccatgtaaggaacaaaattttgaaaaggagaacacaaaatgagaagaagtaattggaaaacaaaattagtagtaatagtcgcatttattttaagcgttatagtggggattgctgcggcaatgtttacaccggatgtatggaaggggttagtaggttttggaacctttgcggtggtattactcgtattagtatttattttagtgaaagttttacgtattgggaggaattaaggaaatgagaaagaaactgatgaaactggatagaaaaaaattggtaacaatgatgactctttccttgatgctgtcagctgtttttgtactgcagataggatttccagtactagcagcggaaaatgatggaagtgcagtgattcaaacgggatttaacaccatttatagtctgattgcagcaatcgtgtcttccatcggaagtctgtatctgctctggggtgtttttgaatgggcacagtccatgaactcacaggatggtggtgcacagtctatggcattcaaacgaatcgcaggaggacttgttgcagttatcacaccacagttgattccagtaatcacttcaagcgtaggagcataaaaaagggggtatttagatgccagactggttgccggagtttctcaacggcagtttattatatggaccgttctatcagattgccagtgcgatatggaatacagctatgtcagcatgtatggggatcatgacaaagacaccggaagggttttcatctgccacatggacttatgtaaataatgaattgtatccgtgggctttgtccatcggaattatgagtctgaacttttttgtgatgatgggattttttaaagcagttggaaacttcaaagaaaatatgacacttgaacttatgatcgaagcaatgatcaaggtggttgtcttaaacgtactgttggtaaaaggattggacgtgatcaaaaagattttcgaaatggcatcagcaatggcaggaacggcggtcatgattgaaccgccggccttctttactggtgatgtggatgttggttctgttatgtttttctggatctatgggttgttctatttccttgtagctatggcgtgttcttttttgattctgatcacgctgtatagccgctatatcaagttgtatcttctggttgtaacattcccacttgcaatgccttcaatcacaggaggacgtggaatcgaaggaacagcctatgcatggatgaaaagctttctatccaatacgtttgaaattgtcattatagcacttgcgattgcaatcgcaggaagaatcacctccggtatttccatttttacatccgatagtgccattttcaatgcgttcgatggatttgcacaggcattgaattccatggtctacatgattttgatggcagtttccgtaaaaggagcaccgacatttttgaataaaacattcaatctgtaatagagcaaggagcgtgtatatgaaaatagatttgaacaaagattttgaagagcaatacaaaaacgaattatggaaaggatttaccgcaagggaactgggatatggagcagctgcattacttgttgctgcagtgattgcacttaccgtgtggaaaacaaccggacttgcgatcaatcttagtatctatacaggaattccgttcatggttccaatcatttaccttgcaatggtaaagcatcaggggcagacctggattgaatctatcaaaaacgtgtggttttatctgaagacaaaggagcttccttatgagatggaagaaagagatttttcatcttacagaatcttttctatggattcaaagcaggaaaaagtacagaggaaaaaaagacctacaagaaggaggaaaagataaatgtcaatctttaacggaaacagtctgtttctgtcaaaaaaaagcaaaacaatgccgatcgtaaaactaccaaagaatgtaaagcagtcactgcagatcgacagagcatttgaaaatgggatttttaagatcgagccaaaagaaaaaatggcggtttatgacagatgttatatttttgaggatatcaattacatcaataaaaatgtaggcgagcagaaatcatttttaatggatctgatgttctggttaaattcgatggatgtagaatttaaaatcacattatccaatgaatatcagagcatggaagagtttttggagtctattcgtgcagaaaagaataaagcagagtatccggacattgcaaagggaatcagacagtggcaggatgaacgaatccaagaaaccaatccgaatgtaacaactctgcgttatttaactgtaactaccagagcagataatgaaaccaatgcaagagtgtatttgaatgcaattgagacaacgatcatggaagcatttgcaggatgggggagccgcattgaaaagctggatgcatttgaacggtttgaatcactgcagaaattgatctgtccgaatcatccggagcaacaggaatatatcactccgttatccaatcataagaaacatcaaaaagactggaagaatgatattctgccaagaagtatccggcagcatcccaactttatggtgatgggagatacctttgttacggttcttttcgggcatcgttaccgccagtcaattgattcagacagttttattcgttctttatccaatgtatcttatccatctttccttacactggattatgccccggttgaaacagatctggtgaatgacaagctgatcaatgcccaggtcaataacgaaagagccattaccgaggaaatcgaacagaagcgaaatgcaggaatcccggccattaatgcttcctatccgagagaaaagaaaaagaatgagatcgagtcctatatcgatcagcttgatgaaaacgatgaaaaaggcttctttctaaatctgttagttgttgttacagctcataacgaggaagaacttgcagaacgtatgaaggagatgcagtcaattggaaaaagagaaggtgttgtgttagaaacctgtgattatacacaattaaaagcatggaatacggcacttccgatcggtggaagacaagtagattatatgcgttttttcttaacgtcttcccttgtggcattccagcctttctttgcacaggatgtcattgagccgggtggacagatgatgggactcaaccgtactacaaagcatttcattgtggggaatcgaaagaaactgccgaatccgcatggaattatcgtaggtttttccggttccggtaaatctatgctgatcaaattgactgagctgtcacagacactgcttgcaacagatgacgatattatgttgatagatccacagaatgaattccgtgatattgtggagaaagacaacggaagttattttgatctgacaccaaaaagcggcattttcctaaatgggtttgaagtatcagaagaagtgtttacctcttcggtcgcagtgcagaaaaaatttatcgcacaacagacggaatatgccaagaccttgtgtgcagctgcaatgaaaaacatcaatgtcacacaggagcatgactcaatcatcagccgatgtacagaacgcatgtttaaggaagtgtttgaacagaaaaaactaaagaaacaaccgacacttttgtggctgcgggaggaaatctataaggaattacaacgagttgataatgagcatgatgcagctctgatccgtgtgatctacaacagtctggaagaatatacgattggtagctgtgatatgctggcacatccatctaatgtgagtctgaaccgccgcatgattggatttggaatgtcaaatgtaccggagaataactgggaagcggttatggttacaatcctgcattacctgtcgatccgtatggattataataagaaatttcagaaagcaacgcatctggtaattgatgaaacgcaggtgatttctaagaaaccgggaagtgcaagacagctgaataacgcagttattacgttccgtaagtttggtggaatcgtaacaatggcaatgcagaatgtgacagcagcattatctaatcagacgctgatcgaattatttcagaactgttcctataagacgttcttagatcagggaggggtagatgcacagagccttgctgcaattcaggaattcagtgcaaaggaatttaaagcattgtcttctggaaatgtcggtgagggtgttatggtctggaataaaaaggttgtgatgtttgatgcactgattagcaaagaaaatgtattgtataagaattatagtaccaacttccatgaaaaagcaaaagaacaaaaggtattatcttttgaagaggaggctgtaccgaaattcagtacaacagaaaaaacagaaacacgttctgtgttgagtgaaaaagaagaagaactgatccttgaggtttcctgtattatggatatcacggtaacagatgtggaacgcttgtttaatcaagacacggaaacttgtcttggatatctaaagagattagagaagaaagggaagctgaaggaagtaaacggaagatacagaaaggttgaataggatgcggatcaatgcaaaagaggatagaagatttaaagcaacagcacttgccttgaatgctgcaaagcaatctgttaaaacttccaagcaacatatgacagctctgagtatgggaaatgaaccagaggaacaagaggaagaaacagcgtctattgatccgacacggtttctaaaccataaagagatccataagtggaatcaattaccgcaatcacagaaaagaagatatattgaagagggcatcaaagcatctgaaatgaaaaggaagtctcgcacaggaatcttaagtcgaacgctggatgatacagaagccatagaaaaaagtgtggcatttcgatatacaacggacctatatcgaatagaagaaaaaactacagagaattcgtttgtaaatccagttacagttccacaaaaaagatttcaaaacagatggtttttgaataagaaacaaggaaaagaagctgtggattcggagcagagaagttctgaagggaagaggaatctgaatgcagaacaagagtttattcaagggaaacgaagaaaccattctgcagaatacggaactgcaagaacagaaataagccccggtatagtaacttcaaatctgacagaaactgtagggacaaatatgacaacagcatccagtacagtaacttctaatatggcagcctctggtacagctgcaactggcatggcaacttccggaggaagtctggttgttatggcagggaaaaaagcagctgataaattcaaagattatatgcaggaacgctccatggcaagtgagcaggcaatccgtaatgtagaatccaaaatgacagagataaaaacagcaaaccatgcaatggattccttaccgtcttctttaaaatatatcggtgcggcagttggtgcagtattactatccgtacttgctgttgtggttcaggcagtattttcatttcttgcagttgtaattggagtgatgcttgcaatcttagttccaatcattgtagtggtcacgattatttcaacaatcataggaattatagcatctatcttcacttccactcctgtgatagcaggaggcggtgaaagaatcgtacagatcgctttgcaggaagagaataatccaagtggagcaaagtattggaactatgttatggggagccaatttgtaaatggagatgtgactccgtggtgtgcgtgctttgtgtcatggtgtgcaaacgaagctggactgattgattcaggaatcgtacccaaagctgcagcggttcgagcgtatcatcggttctatgcagacaaaggacggtttcattatgcatcggaaggatatacaccccagccgggagactttattgtatttggtcaggacacacatattggaattgtgcagtatgtagaaaatggaagagtcgttacgatcgaagggaacacttccgatgcagtgcattcaagaagttatgcgattggaagtgactacatcaccggttattgtaatccggaatatcctgccggaactacgattgaaatcccggaaggaatgggaacaactcatacctatatgggatggagaacaattacaagtcggacaagtctacagtatcagctaagggaacaaagtggagaacattatgacagtgaaggatttggaatcatcgatggaagatatgtgatcgcctgtacaaccttatatggacaggttggagattatgtagatttttaccgggaaaatggagatgtcttacattgtgtgattggagatatcaagaatcaaaatgatccgggatgtaaccagtatggacatcagaatggggaacgtgtggttgagtttgttgttcaatatagtacgtggtatccatcccatgcgaatccgggaacgccaagctgtaaaccagaatggaactcaagagttgttaaggcagtgaaccttggctataactattttcattaaagaaatggtgagagaaagatgaagaaaagaattgttatcagtgcacttttgcttgctttagtgtttggaattttatgtgctggaattattttgattagaaaaaatacagagaaagaagcaaaggaacaaacagtagaacaggcgaaggagcaggaagaaatcagagaaaacgaagaagcaaaaaagaaagatgcatctttagaaaacattgtatttgaaaatatgaatctgttggaaaactatttttcaggtgagaaaataaaaagcttagaagaacaagcggagaattttttgcggcaggatgaagcatttgcttcaacaaaaaagctgacctgtacagatgaaatttatgaaacacagagtcagattcctttttatttcacaacggaagatggaagtgtattgttttccacgtatcacaaagaagacaacctttttctcttctggacagaaacgaaggagaactctgaaacagctgttgcagaatggttaaaacaaaaagaagcagatacaaaagcggtggataccaagttgtgggaggaagagcagtaccttccaagtgaatggacagaaaaaggacaggaaaatatcccggtagttttatctggaaaagaaaatctgcagggaaaaattccagaagaagatttgaattctttggaaatcaaactgcaaaaatttctggaagagaacaatgagctgagaagagagatttctatttcagcagataaaatcgtgcaggaagatcaaaagattatatttgaagcagacttcaaaacagcaaggattgacaagaagcagatccagatcacatatcagcttgcggagaaacagtttggattttctttacggtgacaggaaggatgagaaaagaaaatgaacatactttacccaataattaacgaaaatacagtaaaaaagggtcttagggattgtccctaacaagagtgcgaaatgtctgacattttgcgtatcttgcaaatcacttagggtgatttagagaaagtcatacaggatgctgtacggaaagtcatacagaaagctgtacaaaaagaggcaatgtcatacgaaatgctgtacataagtcatatgcatagctgtacagtcatacggaatgctgtacatgagtcatatgcatagctgtacaagtcatacagaatgctgtacaacacaaaaatacagggaaaggaagaaaacatatggggagaacacgaaaaacttacagactgtcagatgaagcaatccaattgattgagaatcgagatcggactgcttatccgactgccacagattttatagaggcaaaacttaataagccaacaaaagatgtgacagaattattgtatcaagtttccatgcagcttgaagaaataaagaggttggtggcacaacaaaagcaggaaacagcagaggagcagaaagcatttttctgaaaaaagtgtacctaaagtaacctagaaaacataaaatacatttgataaactatacttagagaaaccagaggaagggatgtcggaagcgatgtctcttttttatttcaggaaggaacaggcaatggatttaaaagaacagttgaaaaaagtgttgagtgaccagaataaattggaaagaaaaaaagatgattttatgaaggagtatgaggaaaagaagaaaaaaattctattgaagaaaaaagagttagaacaaaaaatccagaaagaaaaaaatgaaaaaattttacaggcagtgcaggaaagctttggagaaatcaatgaaaaaaatatgggtactttcttagagctcttaaagaaaaacagtgaagacttttcgcttgagatggaaattgcgtcagaagaaacggaagaaaatcatgaggagcagacagaaatgaatgtaccgaatttcggtacacagcaagacaatgaaagtaatccgtatccatttagtgagaattaattatgagtcggagagagatccgttatacggttcgtttgtcagagcaagagtatcagcaattaaaaaagaaaatcttagaagataacgagtggacatttaaatacggaacaaaaaaggatcgtgtaaatatttcggcttatatcagagatgctttgttccggaaagaaaaagaagagagacagtattaccgggaactgaaaaatttaaattttcaaatacgaaaaatcggagtcaatattaatcaggtagctgcaaagataaacagcggttacaaaaaatatgattccgttttttatttacaaaaaagtctttcacaggtggaagaggaagtaaaaaagttgattgaaaagttggaggaagacagtggcaatcacaaaactgatgaatatcaagcaggggaagatgggagggggcagacacttaaataattcaatccgctatattatgaatccgaaaaaaacagaggaaggaaaatggattggaggaaatgcagggctgacttcagatgaagtatatcaaacgatgataaatacgaagatagattgggataaattgaaaggacggcaaggatatcattttgtaatcagttttaaaccaggcgaggtaaaggaagagacagcatatcaagtaataaaggaattctgcgaagaatatttaggagattatttcgattatgttttttccatccataatgatcagcatcatatgcatgggcatattgtatttaattctgtaaaccgtatgactggttataaataccgatacgtaaatggagactgggaaaaaaagattcagccgattacagacagaatctgcgaaaggtatggactgccaccattggaatttgaccaagaaaatagaaaaggaaaatcctatgcacagtgggaagcggagaaaaaaggaaaaccaaactggaaaaagatgattcaggcagacattgattacatcatatcgatctccaataatgaagcagaatttcttcaaaatatggaaaagattggttatcacgtccgaaagggaaattctcagaaacatggaatctattttgcgttccgagcagcagaacaaaagagggcctggcgaagttataaattaggggaaggatatagttatgcagacattctgactagacttgaaaaagaagagtatattcaacaccatccgagaagtcccaaattatgttcttataaaattccaaaagccgcttttggtggtctaactgtggaatttcaaaaaaagcgaattcggaaatggtattttgtcacttttcgttaccataacgtgaaaaatccttatgcagtagattacagggaggtgagaaagactttgttacagatcgatcagttatatgaaaatattctttatctgaatcagtataacataagatcctacgaggagttgttagtgagagaagcaaaagtaatagaaatggaacggaaacttccagctacaggcttgaaagaaggtgatgcagcaaaacagatcaaagaaaatttacagcatatcaggcaggaaaaaaagatcataaaacgtataaaacgagaggaggagtcgcatccatttttttacaaaccgaccggacaagcaaacgtacagattcaagaagataagaagaaagaggtggaagagaagtggcagacaaccaaatcaatatgattaatctcaatgagatatttcaagatgtaaaaacagaccaaatcagacagttattgaatgaaacaaaggacagcaagacttgtatgtggtatctcatgtgtgcattagacggaatgaatgacaatgaacttttaaaacttgcaggatacaccattccacaaatcaaggaagcacgttctgaatatttgaaaaagaaatactgtggaaacaatacaacgtttgccgaagttcagaatttaaaaaatgaagtgaaagaaattgcatacgaaagtaaagctgtgcgttcctcaatagaggaagaattggaacacgcaatcaagaatctgattgattcaaaggatgaaatgatcaaattgttaaagtatcagaaagttgacttgcagcgtcagatcgaacaaatgaagtctaaagtaatccagttagaaaatcagaaaaaagaaacaagttcagatgaaaaaccagtggaagaatcacgagtagaaaatagaaagaaggaaactaacatgaatgatattattacagaaaagatacaaacagaggaagcaagaacaggattggcaaagcgaatgcaaaggtatttttttgcagtaccagatacaagaaagtttattgaaacatatttaaataatgagaacctgtctgctgatcagaaagaataccttcttagctgtttggagacgggaatgagtatgaaggagattgagaacattttttctgaaaaattatcggtagatcagatgaagcgtttaaatgcaattgttcaaaacagacgaaataaaaaatgaagattcaggtagaaatccatttatcttatgagtccgaagtattagcctatggaatgatcacgctcgaagatctgattcgatttccaatacagctgcgtaaatataagaataaggagactgggaaagacctttcttttgtcagctatccaagaagagaacggaatggaaaatgggaaaatgtccttgtgccggactcaatcttaaggaaagagattgaaaaagcagttggagaaaaaatcaaagaggagataggaaaggaattttatttaccagaaatcgaagtcctttcaatctgtccaatcactccaaggcatccaccggatgcaagagcatatatctgtggtgttgcatccattcaagtattaggacttacgattcatggaattacgatcaagcagggacagaaaggatacttcatcaatatgccccaatataaaaaagcagatgggtatcatgatgtaatctatgcaactgggaaagctttgcaggagaagattgaaaaaactgttctaaaagaatataagaaaacaatcagtgtaccgaatttcggtacaaaacagcaggaggaattgaaagatgaataaagatgattttatgaaaattgttgaagagaatattaagtatcatttgccggagagttttgcagattgcaggtttgaagcaggaaaaccgatgagtcttattgtttcagaaggtaattcgccagacgcaatcagactccatctgggagaagtgtatgatgcgtttatggaagataaaaatattttttctgttatggaattcattgcaaaaaatgtggaagaagcatggtccattacaggagaaatggatgaaacaaaagagcaactccaaggttacataaacaactatgaagaagcaaaaaaacatctacagattgtattaagcgatccagatgttgaagctgttttagccaatagtgttgtgactcaagtaggtgcttttaatgccaagtacaggttgcttttggattctattgatctggaaagtgaaatgtctgttagcgtgacgcagaatctgttagacaagtggggagttacaacagaacaattgcatcaggatgcattatctgtagagggaaaatggaacaaaccggtacttgtggatgcgtttgatataatcactcatttacagtttaaattttccaaaccaatgaatcttttggaaaataatggagcaaaattggacggacaatcattatatacgttaacaaatgaaaatgcatataaaggtgcaggaatgttagcgcattcagaagtacttgaacagattggcagtttattgtcagataacaattattatatccttccgtcttccaagcatgaacttttgattttactggatgatggttcgaagtcagtgaaagaactccgcaagatggtacagtatgtaaatgaaaaagaggtgtcagccaaagatctgttatcagataaaatattatattacaattctaaagagaaagtattagaacttgcggttgataaagcggagaatctgtctaaagaagtaacgaatacgaagcaggaagacgttgcgaagaacacagcgaagcagccaaagaaaacagcagaatttacaccacgaatgtaataagaccttgtaatgtaccgaatttcggtacgcaagcaggaatattatcctttactatattggttaacagggaggtgaactgaggaaatgtcgaatgttacaaaggaacaggaatatattacactggaagatttgacaagagagattcaatctacagacgaagaaatatttatttccatcagttttatggaggtggatgcagatgaataataaggaagttcaggattccttaaggcaagtaggaattcgtctggtagaagaaccgcctttattaagtccggaaccaatggataatccggaagctgcagtcagagttttaggaaaatggttaagtgagatggaccgtgaactcttttgcgtagtcaatcttaatacgaaccttacaccgattaatatgaatgtggtcagtatgggagctttgaatgtggcctatgtacatccaagggagacgatgaaaagtgcgatcctttcaaattcagcctatctcatgctggtacataaccatttaggatcgctgaaaccatcaaaagaggatatcacagttacagatcggattcaaagtgcagcatcccttatgggaatccctgttttggatcatatcatcgtaggacgtaatcaggaattcttctctctgcgggaaaataatgtattttcttttgagaacgatattagttatacttcagaacaatcgaagctgcagtggacacaacaaatgggaattgcggaacaatccgcttacagagtgcagggaaaagaagcaactgaatcgaaattagatacaattatgaaggccttggaagaaggcgttgaaaaagtcttcacctcggagcagtatcagatgtatttgcagacaatggctacatttcataactattcctttaacaatacactgctgattgccatgcaacgtccggatgcaacactacttgcaggatatcagacctggcagaaaaagtttcaccgtcatgtgaagcgtggggagaaaggaatcaagatcattgcacctgttccggtgaaagagaaacgacaagtggaaaagatcgatgaagaaacgcaggaaattgtaatcggaatagatggacagccagaaacagagactgtagaacgcatcttaccacgattccgggtaacaactgtatttgatgtaagtcagacagaaggagaaccgctacctagtttagaggtaaatgaattagcaggagatgttcttatctatgaggagtttatgaagggactggaagaaatatcaccagttccttttcagtttcaggaaattgatagtggagcaaagggatattacagcaatgtagagaagctggtcgcaatacagacggggatgagtcaggcacagacgatgaaaaccgctgtacatgaaatggctcatgcgattcttcatgaccgtgatgtcatggaagaaaacggaatcacaaaggatcgaatgacaatagaggtcgaagccgaaagcgtagcctatgttgtctgtaatcattttggactggatacttcggattattcttttaattatgttgccggatggtcttctggtaaagaaatgtcggagcttagaagttcgatggatacgatacgattgacttcttcccagctgattgctgatattacagagaaattgttagaactgcagaagacaagagaattggaaaatgatatcaaaacagaagagcttgcagaggaaagcagattcttttccaatacagaaaatagttatgcaatctatcagtatcatcaggtggataacgagatgggatatcaatatatgagtcttgatttcatagagaaaatgggaatgtctgtaaaagggcaggattatcaaatgatgtatcagggagtattggaagtgcaggatacgttggaagacttgtatatcaaatttaatattgatcgaccagaaggttttaaaggacattccatgtctacatcggatgtggtgattttgaagcgtgatggagaaatgaaagcctattatgtgaatgatattggtttccgggaacttccagcatttatagagcaaagagcagaggtacttcgagaaacgaacaatgaacttgtagtaaaacaagacaaatctggtaaagaacaggaagaaccagagaagattagagaagataggacaatcacagaaacgacccaagcgaatgaacaatcaaacataagcaaaaagaaaaatcagcagatgcaggtaggacttcatagataggagtcttttttaattgtgccgaaattcggtacgtgaaaaagaggagaatggacaaatgaatgaagagaacagggaattagaggagatcagattggaaatgcaagaaatccgtaaaatgttgcatgagattaaggaggatactaaatttttcaaacagtttatggaacgatatcatattccaatgcaggaagaagtaaaaagagaggcagaaataaaagatgagacgaatcgcaggggaaaggtaaacgaaatagaacctaaattatagtttgtaccgaaattcggtacatgggcagaagaaaatgtggataactcttaaaagagactgcggtttggaggaaaaccagagatgaacgaagaaattagagaagcggaagaagtcctgatgcttataaaaaaagctaccatgtttgctgatccgatcatgaagataggaacaataggtcttgtgaagatgatacaatttatggcaaggatggtaaaagagaaaatcattgataagaaagagtttaaagatattcaggactttatcaaacgtacagacggaaaatttgatgtgatcaatattccggtagatcaaaaattgcgtcttggtgcaaatgcatatccggtacgagaatttgaaaacctgaaagaaagcggtgtacgttttatggaaatgccagatctgaataaagaggatcattatgtacagcttgctgtctgcaaagaggacagagaaatctttgaagcatggtttggaagatatcttggaaataaaatgtccggaggagagaaaacaatcgatagtttgcttgcatttacggaaagaaaaacatctattttcagtgtcccatttgaaggaaaagaagatattttccgaacagattttgatgccatgaagatcaattatacagtaatgccagatctgaagcttggtgacggacagattcagatcatggttgcaaactatgatgcagataaagtaagacaatggtatgcgttgtatcagcaatcgatgctaaaccgtggagaaacggtggcagatctgaatgaaatcgatatggaaacctatcagaaaacagctgaaatgtctacggaagaatatatcaataccggagatgaaacagtaaaagaagcaaatcaaaagtatgagaatgaaaaaacatctgcggagaaagtacagttagcggagaatcagatggactatgattattatgaagggaatcagatgtatcaaaaattcaccatcaataaagatgttttagtgaaaccgatagaagataagataccagaaggctttcaggactattttgtaagtaaggttcctggaacttatggaaaagagatccaatatctggtaattccaaaagatcaggtatatgcttccgaggattcgaaaacatatacggcatttttagaaaaagataaaaagccatttctgattgatcaggatttaaaacctatcaaatcagaaaagcgtccgtttgcaaaggaactattcgaaaaatattatagtatttcagagaaagaaaagatggcaacacaggccgcccagcagagaatggaaaaggcaatcggaaaaacagtagcgaaaaaacaaataaaagcaccaactccaccgattaaagcaaagtagtaatagggggatgcaaagatggttgaaaaaaggaaaacaccatggtgggcttttatcctggcacttatcatattaatgattctaagttatttcggatgtgggcttttgaaattagatggagttaccatgagtaattatcaacaaaagcttttgtatatttttactcatccattccgtaactggtggacgaagaaaaccccggcattcatgagtgctgcattcgttgcatggatcatgttcattgcatattatctggatcagaatcgaaactatcattttggagtggagaacggttccgaacaatgggcggatgtaaataaattgagtaaaacattaagagattctaagaatgagaagaacaatacttatttgagcgaacgaattgcagtatccaatcatgctctgtcaaacatgaatatgcttgtgattggaggttccggttcctataaaacgacttctgttctgacaccgaatcttctgttagctggaatgacaaatgtaatattggatatcaaaggtgatctgttacggaaacacggaaattatttgaaggctcatggcgtaatggttaaatcttttaatctgatcaatccggaagagtcagaccgatataatccgatgcaatatcttgagaaggaaacagacgttattcgactgatcacaaacatgcaggcatcggtcaagcccccggatgctcaaaaaggggagcctttctgggatgatggagtagcactctatctgcagtcgatgttctttcatgaatggctgactgcaaaggaagaaaacagaaagcctacactgaataacatattaaaacttgtaaatatggaatcaaagcatattgaagatgaggaggaagaggataagacagagttacagattgaaatggacaggcttgcagagacgcatggagcagactatccaccagtaagagattatcgaaaattaaaagaaggtgcaacagagacagttcgttccattatcattatggtaaatgccatgcttagattgtgtgaaacagccgcacttaaacgactgtttgaagatgatgatattgatataccaagcttaggattaggagtcgatggaaatccaaataagaaaacagcattgtttttggtaatgccggataacgatcagtcctttaattttttgatttccatgttttatacccagctatttgatgtattgattcggattgcagatcataaatgtcatggcagcttgccgatccatgtgagattatgggcagatgaattctatgctggcccgaaaccaaccaataccgaagtactgatgggaacaatccgaagcaggaatctgtcgattgttcctattttacagtccattgcacagatcaaagcagtctttccgcaggaaaaatgggaggtattcttagataactgtgcagttatgatttatcttggttcaggacctgcagcattttccacacatgaatatatctcaaagctacttggcgaaatgaccattgatactagaacggatggcgtaactagtggtgcacatggaaactcaagtttaaataatcagagagcaggacgaggattgatgacaccgggagaagtaaagagacttgatcgtaagaaatgcctaatctttatggaaggccagtatcctatcatggattggaagaatcttccgtttaatacagcagtctggaaagaatccgaaagacttgcagggaaggaaggatataaacatccggttcgtgtcgtatataacccaaaaacaatgacctatcgaactatcttaaataagtcaaagttccaagtgattgataagaaagatctggaattatataaagaagctgaaaagacagacaagagcatcaaggtctgtgaagtgaatgaggaagactttttatatcttaattttgatacaaatccgaaaccaacggaagaagaacttatgcagatgttggagaaagccagaaaagagatgcctggattagaaaaagaggaaaatagttcggaagcgcaattgatagaagattcccggttcaacgaggagagagttaatgtaccgaatttcggtacgcaaaaagaggaatgggatttgtccggaacgattgaacagtgtattatccgatatgcatcaaaattagatggagatcagatgaatgaaatcttgttgggtttggaagaaggcttgactgatgagcaggtgaagtcttattttaagttgccagcagatcagatgaagccgtatcgaagagaaatattaaatgaaaagtagttgcttctctgagctatcgagctctctcggagagactcatttacataagatgcaagaatatgctattgccgtggatatttggattcgctttccatataattagttgaatggcaaaccgtaagaatatgtggtggttcttacggtttgttttttagaaaaaattatacataatcaccggcaatcattacaaattcattcatgttgtgaactatccgaccattgtttagaatttttgcttcaaaaggaactctcccaaagtccataatgtgccttaaattgattgtcagatctttttgagaagcaatttgcaagatccattttgcacaattgtcgccacaggaggaggcattaaatacccgattattcgtatcgaatgccataagcatcagtgtttttacaccaccggataaattgactggtggtattggaccaagaactggactatctattagatgagagctgacaataactgatttgtcaacatctttaatcatttcaacagataatggatcagtaatccattcatcttcgtatgtgttatcaaaataggttggaggatggaaaattacattttccatgtttcctaaatagatattgagcatattaaatagcctttcgtttttagaattcactaatatttttagtaatagaaattaatatgtttattataaatagggtaatgctttatttcaagggatgacagctttaatatatgaaaaataaatattatttataaaacgaaaataaaaaataagctcaatattcactctttgcaaagaattactagagtgaataagttgatttatataagctctatttttctataaatggaaatgaagagtttaacagatttccagcattaacatttaatgcatctgcaatattatataagacttctaaagaaaagggacgtataatattgggtgcttcaatggaacttaaatgagaacgacttatatttgctttttcagccaattgttcttgggacattccttgcatttttcgtaaagcagctatggtcaaaccaagttggataaaacggtctctatttttaaattcaacttctttgctcattgatattttcaatctccttatctttgtctaattattatataattttatttttgactttattgtcttatacaatgagctattgaccgatattttgagcaatgatataatttgacgtataattgttgattaaaaaaggaattagaataagagataacaggatcatcagaaggtaataggttgataattctttaaattattttataatataagctgtaaaaaagtattaaaaataagagaggaagcaaccagatgtatagaatagcaatctgtgatgatgacatagcatatactgaatatttggaaaaaaaaataaaagaggtgttgggaaaatctgaaagaagctcaatttgtaaatattattcgggtgaagagtttatagatgatttggagttggaatttgatctggtttttttagacatgcagatgggcgaaattgatggtattacagctgctattaaatttagaaaaagaaatcaagatgctgtacttgttttttgtacaggaatacaattaccgcaaccagaattttttgatgttcaaccatttagatatttgatgaaaaattatacagaaaataaaatggatgaagaattaaaaaacattatcaataagatgatagagaacaaaaaagaagtatatattgttgttagaaatgatggcagaatggataaaattgctattgataatataacgtatatttcaaacataaaaagagggtgctgcattcatatattctcaaaaaaggataatcaatgttatgaatttgcaagcaacaaaaagttgatagatacttatgaagaattaaaaaatcaatcttttgaatatgctcataatagttatattgtaaattttaaagcaattataggaataaaaaatgatgttataacattggaggatttaacaacgttaaatatttcaagatctaaaagaaagatatttcatagtaggtttgcagattatcttggtggaaagtataagaggaatagataattatcatggaagtatttttaaatataatgacatgtatttttgaagttacaattttcgagttattttttaggggattactacgtagacgatacagctctccgatattttatattgctatatatataggggtagttagtttgatttatgggattaattccttaggcaattcgaaattaaatttgattgctaatattttgatttattatgcggtttatagtctattatatgaagaagaattaaaagaaagagtattctattttactgtgttttttaccacttttgctggagtagaaattctttgtgaatttgttctttcattgatacttggtgaagggtatagttgggagaatcaatctcacttagctagatttatagtgatatgtttggaaaaattgataacttttgtcacgttgtttataattaagaaaaagttaaacaaacaaaaatatgggataaaaaatgaaatattattatattcgttagtcttgccaattgctacttttggaatatatagtgcattgctttattcgggcttaatggtggaagtatcagggataaatgaaggaattttattagttggatgtattctattactttttgcaaatgcgattatattctttttatatgaatatatatttagacttaattatgagaatcaagcattggaaatgcttactttaaaaacagatttggaaaagaaatattatgatagaatggaaaaagtaaatttagaacaatcaaattatatgcatgatttaaagtttatgcttagaacaataggaaatttggccgcacaagatcaaaatgaagagattacatcagtaattcaaaatatgaagatacggataggggagatggaggaagaattcttttgtaagaacaaagttttgaatactattctatgcgaaaaaaagaaagaagctattgataataaaataaattatcaggcatatgttgaaccaggaatacctttagattttattcaagatattgatataataattatcatgggaaatattattgataatgctattgaagcaacaaaaaaaattgattatggatacattgatattaatgtattcgcaacacaaaagggacatttcttaatgataagagttgaaaataaatttgatggaatagttaaaaagaaaggagacgatttttgttcaactaaacaagagccagataaacatggtattgggcttaagaatgtagcggattgtgtaaataaatatggtggtattttacaaatagatgttaatgacaatatatttactgtgtctgttatatttacggtattataagattatgaaaaatggtatgaatttagttcctgttgtcatatattatactttatgtgtaaaatgttttatgatttttaagtcaaagagtttcataggaagcaagtgtgatttagcttgtataaaaaagcctattttggggcttttttttataatcaaatttataatgtatactgcatacaattataacgcttatagttggatattaaatagctagattattcatattactgagaagcagatgagagtcgtttggtggaatgttcatttaagaaaaatagagcgtttattgtaatattcagttaagtattttgattgcttttaaatatttaatttgaatgagattgaatattccagtctcggtgtccatgcagtccggtgataaggaattcgattggcaattataaagaatacaagaaatctcacaaatgtaaagccggcttatgccacgcaaagcggctctgggcttgacattttttcgattccttatgagtattaatcaagccaatcaatggtggtttccgctccggaatatcggtttccatattaccggaatctgggtttcttgagacaagaatatccatgagatagaaaaatataaaggtgttttctatataagaaatcttcttaaggtaaagcatacttacgttttgcaagaggattttgatttttaaattaatagcaaaaattcctgtggattgtagtcaaaacaatcgagaatagtttttattttggaatattgattgccatattactggaattataatttcttacaataggaatatgcattttcagatactactttcttcaaataagagttaacttttgcaaaaatagccgagttttctgctgtttttgcctgtctattgaaaatgaaaaaatgatgttatataaaaaataaaagaaaataaattgtagtaggaggtatgacttatgagaaaacagagaaaagagggaagaagcgatgtgggaagaagattaaagaatcctattttatttattaattcgatagcaatgtttttagcaatgctttctattaatacgacttgtatatgggtacattatcaacctaaagtaccaggtgggttacgattaaaaaataaggaaaatgaaaagtgaaacacttagctgaaaaaattgtgatttaccaaattaatcaaggaattataactaatgatgaaaaggaaaattatatatatgcatattttatattaatggaacaaacaataaatatttttatagcatttagtataggtataataaccggcaatgtaatttatgttatatcatttttaatatcatatatatggttaagaacatttggaggaggctatcatgcgcgaacggttcagcaatgttgtatatcttcaatagggataattattttaatatgtgttataaaaaatcataatttcattaatgaaaaattgttagatatattgttaagtatgtgcaatataattattttcttattggcacctatagagtcaaaaaataaattgttgaatcaaaaggagaaaagaagaaatcatagaaacacaataataacgttgatattagaagagttggtgatgatttgcctgatgtacttgggtaaaaaagaaatatgtctaggtataaagacagcaatattaatttttactgtttttttggtaataggaaaaaagataaataatacagaaagggatgaaaagttgtggatacaaaaaattatacggttgggaaaagaatgaccgagtggggatatggaaatgctcaatcaattacatttatcgtaactgaggattgtaatcttaggtgtaaatattgctatataacacataaatcttcaaataaaaaaatgagttttgaggtggcaaagaaatttatagattacattttaagtgaaaatattaaatatcaggatgcggtaacattagattttataggtggagaaccgttattagaagtggaattaattgataaaatctgtgattattttaaattgcagacatatttaaaaggaagctcatggttttggaactatagaataagtatatgtacaaatggcgtaaattattcaaatgaaaaagttcaagattttataaaaaagaatccagggaaaataggaattacaattactgtagatggaactaaggaaaaacatgatctgcaaagagtttttccaaacgggtcaggatcctatgatattataaaacctaatttagaattatggaagaaacaatttgtagcaacaacaaaggtaacttttgcaagtgatgatttaaaatttttaaaggatagtattatagaactttggaatgaaggaatatatgatatagcagctaatgtagtttacgaagatgtatggaaagaaggagatgatcaaatatttgaagatcagctgaaatcattagcagattatatattagatcatcatctttttgacaaatatagttgtactctttttgatgatactattggagctccatataataatgagttattaaaacaaacatgttgtggtgctggtaagatgctagcacttggagtggatggaaaaatatatccgtgtatgagatattgtgcatattcattagataataaagaaccttatattataggagatgttgatcagggaattgattttgataaagtaagaccatttgaaactgtaacgtataaattacaaagtgataacgaatgtttaaaatgtccagttgctgtagggtgtggattttgccaaggatttaattatgatgtagccgatacgtatactaactttcagagagctaaatatatttgcaaaatgcataaagcgagagttcgtgctaataattactatttttcaaaattgtataatcaatatggaattgaaagagagtctgtgtattctcatgaaagtaggacaatgaatttattactgtctaacgattatgtagcttgttgcatgggagaaaatagtaatgaggaaatattagaagaaaaaagaatgagtgatgaggcaatatttgcaggtctgaaatatgcagaacaacatttttataaaccggtatttattcattctaaaaagggaagtacaatcgttaaacatgaaatatatgatgagttcaaaattttacatatagttcctattgaattttatgaaaaagcaaaacagtattataaggatgtcattccggtaattacatcaactgatgtaaaaggaatagaaaaaatgcagttagacaatgtgatttttaatatttctgcagataaaattagtgatttatatagtgtcatttcaatattatggggaaaatcaaatcggattaatattaatatttttaatttagataaagattttgacatagaggaatacaaacagcaattattaaaactgaaaacattactagtaaaaacagtaaacgagactaaaacatttaacacagaaattaatgtattgacagatattttgttattggataagcatgaaaattgtggagctggagatacatcaataacgcttgctccagatgaaaaattttatgtctgtccagcattctttaaagatgagaaagaagaaagtattggaactttaatagatggaaacattttaataaaaaataaacatttatatgaacaagaatattttccaatatgtcaagtttgcgatgcatatcattgttcaaagtgcgtgtatcataataaaaaacatacaacagaagtaaatgtttcctcagcgattcaatgtcaaaaaacctgggttgaaagaaatatatctaagatgatagaagatgagttagaaaatgaattttgttttgcgcataaacttgaagcatcagatgttaaggatccgattgatatattacgaaaaaatctaaataatctatcaataggattttatccggaacaatagggaaaaggaaaagaatgattatgaaaaaaattattggacaagttacacatgaggaaacagaaacaatacgaactatgtttgaaataagaattgcattagaaaatttacttttaatggataacaaagaagtagaaaacagagtattgaaggatctaaatcaaattagtgagaaaatgcaggcttggtgggatgagatggggaaaaaatatcaatggccaggtgaggaaaatgcacaatgggtaattgactttaacacaggagaaattaatttatctaagggaggaaaatgttaaaaattcatacggagttagtaaaaaaatatttttatacaaaatacaaagaaatagtgactcttttaatcttgattctatcaggaacagtggtgggggctattaccccactattatttggaaatataatagatttgattttaaaaaaacagttatattttatcataaaaaatgtaatgatatttttttgcttatcattattagaaatttttttgggcgttatagaagcatatttaggaaataaaattgtcttacaaatttctaatgagatcaaaaaagatttaactgaaaatataatcaatatgaaaatggctcaaattgatcaatatgcaaaaggagagttagtaaatagagtagaaggcgatcctgaggaaatagctagtacatatattagtttttttacaggaggtatacaaattagtgtaagtttggtaatttcaatatattttgctgttactttttctgaaatattaacagggatagcactaatttttatgacactatcttatgtaggaacattgttatataggaaacagtatcaaaaagctaagaagcaattaaaagattattcagataaatattattcggaaattacagagaactttagaaatctggaaggaatcaaaagttttaatttacaaaatactataatggaaagactgaaacaaacataccagagaaatttttgcttatcaaaaagaatgttttttattgagggaaaaattaattttacaaaaaatataggtaatacaatatttgaaacagtattactcttgagtgcaagtattttaattatacacgggaaattaagcattggaaatttggtttcatttaatcaatatattagtaatgtgtttaattcatcatctcaagttatagattacattatgagattaaatgcatgtgaggtaaatataagacgtattgaagaaattaaagcaggatttcaggaggattcatccaatgataaaaaatctatagataaagtaaaaagtgtgaaaatagaaggagtagactttaagtacaattctgataatattttagaaaatgtaaatctaaaaattgattcttgtggtttgtattctattattggaatgaatggtgcagggaaaagcacaattttaaaattgctcttaaaattgtatgaacctgttagaggaaatatatatataaataatattaattactctgaattaaacttgagaaacataagaaatgaaattagttatatccctaaaaatccggtcctttttaatgaaagtattgaatacaaccttacattgggaaaatcggttaagagagaagagctagaagagatttgtcaaaaagttggattagatagttttattaagtgtagatcaggaggatataaagaaaaaattggtgatgatggttattcattatctagtggaactaagcaaaaaatatccatagctagagctgcaataaaagatacttcgctttggatatgcgatgaaataacatcggatttagatagaaaaacagaattagaaatcatcaatttattaagagagatagcaaaaaatcgaattgtaattatggtaagtcatgatttttcttctattagggagagtaaggaaatctttgtactgcataataaatctatagtttgttctggcgacaatgttactttaagaaaaaatagtgaaatttatagaaaactctttttcgatggaaaaaaagagttttaaaagaaatccaatatatattcaatacgaggttagatacagcgagtatttgcttatgaaaagaatttacaatttatgcaaatgcggactgtttctatataaatttattaataaaaatgctttatagcataagaagggaggaggtgtaactatgagaaatttgtataaaagtaaattgagtaaaagcagtgaaccaactacatatgctatttgtccatttaaaggaggatgtttctttacttgtgcaggaatgtgtactggtacatgttcaggaagttgtgcaggtcaaagttggaaatatggcaaatgagtatgaaccaatataatgggaagaaggtgaagtatgaattactcaagtaaaattggacttgaaagcagtaatgctattcagccaagattttgttttgcatgctatcataattgtagtttgagctgtaatacaaactgtaaaggtggttgctcagcaaaatgcaataatgaatgtagcggaagttgtggaaataactgtagatcatcctgtataagtagtgcgaaatcacattagtaaaggattcctgaagagattaaattgtttgttagttcctaatctcttcagggatatttattattatataaaacatattagaacaggtgttttaaaagcgtacatattaataaaaacttttgcatagtacgtaattacattaagaaaatagattaaatattatggagaataagtatggataaagtaaatatgtgtcaaatacaaaaacagattgataattcaaaagaggaaatgatgggagttatcagtttcattttggcaatatttcctttaagttttgttataaatagttatctggttgctatgaagaatataggggaaaatcagggaacagagaatattcgaacgatctttttttatgtattaatatttttaataattggcttaatgtttattataatgtacatattaaccagtgcaatcaaaattaaggcgcatcgatattctcttttatttatattaggaataaagaaaaaagatttttggaaaatattatataaagattattgtattacattgttattaataggggtaaaaagcacaatagttgttaatttaatatgtctttgtatgacaagtgctatatggagtcgaaaaaaaaagattttcttaatagatttcttgaaaaattattttattagtggaagtgcagtttgtgtaatacttgttttgctcattttggtgtcagtaattattgttttttatcatagtttaaaaaggaatatgctagaattttgggagggattaaatgaaaatataagttataactatgatacaaaagtattttattatctaaaacccattttaggtgtatgtatagaatgtgtggtaataatattttgcttaaattatcatactatatattatgcagctgtattacagttgatttctttttatcttattagtagttctacggaatgtttaagatggattgttaaatgcatatcaaaaagggactataaaaaaattattacgtcaaatgcggtgttgtatcaatataaattaaattctaaacttataataagtatttatttacttaattttatagttgtttttgtattaggaggagttattttatctaatttatcatatgaaattgaaagtaattatcaagaacgatacccatatgaatttgttgtttatggtaaaggtactaattttttgaaggaatcatatccattttttcaaggaaaaacagaagaaggaaaaagtattgcaatattttcattatcatcttatgaagatatggttaaaaaaaaggaaacgttatccaatgaggaagtaatttatatttcacaaaataattctgaggattttaaaccattagaagggaaaaaagaaataaagatatatttcaattctgaggaagcagattataaagtaaaggatagtagatgggaaattatttttggagaaaatgtttcatcaaaactagaaaatattttagttatcagtgattatgaatttaaaattaatgctattgataaatggagtctttggtatggggatagaaataacatcaaaataaaaaaaggagtatatgtttggaaacgtacagaagcgatagaaatcgaacagaaaaatgatcaatatgtgttaattttagtatgtatcataggtatatttttaatattagaaggacaaggaattattttaataaaacaagtagtaaatcattcttctataacaaacaagtataagttatttttttcattgggaatgtctcaaaaagatagaaaaaagtatttttttcatgaaattaaaaatatagcattttatccaatgatattagggtgcgttaggggaattttactcttaggaataatatatttttatcaggaaggtgagtttagtaagattttcatttattatttggcagtatgcgtgttaatattgttaattcaatatggaagttattattgtattgcaatgctaatggcaaagctatataaaattgattcagaaccacaataaagggaaggaaaggacatggaattatatacacttaatgaggtaagtaaatattatgaaagatggaatataagaacacgtgaaaaaaatataaattatgtaataaaaaacttgaatttaacaataaaagataatgaatttattgttgttgtaggaaagtctggaataggaaaaactacattattaaaaatgttaggtggaattgagaaaccatctgccggatctattttttataccaataaggaattatatcagtgtaaagaatccgaaatggaggggtatcgtagaaaagaaataggttttatatttcaggattatagattactagatgagatgaccgtaagggaaaatatattagtgccacaaattcttgatggagcaagaagtacgattgctgaaagaaaaatgaaaaaacttacaaaagtacttgggattagtgaaaaaaaagattattatccttatgagttgtctggtggagaaaagcaacgcgttgcaatttgtagagcgttaataaatgagcctaaagtaatattagctgatgaaccaacgggaaatctagatacttttaatacagaattgattttagaaattttacttagaataaaaatagagttaaaaaaaacaatcattttagtaactcatgataaaggaatttgtaaatttgctgatagaattattgaaatgaaaaatggaaaacttcaagagcaaaacataaaatagtttttacagagaacaagtctgcgagaagtatgtagacagcgtagtgaaagtgatcgaaggcgaaggtctttgcgagtaagcttatatcacttgggtaattatgtgtgaaatagtattagaaaattaaatcaagtattctttaaaagtcctactcaacatctgatatgagtagggctttttatttcggataatcaaaaagatgttcacaatgttttttttaaatttatcgaactaattgagggtcagtcgtgagcggctgacccttatttgattgccattttccaaaatttagctgtgtttttctagaaaaaaataaaaaaatcccgtttttaccgaagaattgtcccgttctattcgggagatatagtgaagaggtgtaagacgagacaaagaaattcatctaaacggaaggaggtgaactcttatgggaaaaccttcttctaatgatgaaacaaccattcgccaccaatttgaccgattttgtcagaaagtgttgcatgacgaaaaagtagattacatcagaaagcaggaacacctgaaacagcatgaaattacatttgatgaagttccgggaaaggagttgtataaattgttagtctttgatgaatatgaagcggaacatgagcatttttcattgtacggttatgacattgctgtaaaagatactctgctagcagaggctttaaaggaactttcagacagaaaaagaaatgtcattttactttcctattttatggagatgagtgatgctgatattgcgagaaaaatgaatttagtccaaagcacaattttccaacataaaaaagaatcgattaaaatattaaagaaaatgatggaggagataaaaaaggatgaagaagattaattatagattagatgaggaaaaattaccatcatattctatcataaaggcagcaacagaagggaatgttgatgcaatcaatcttatattaaagcattatgaaagatacattctaaaattatctactagaatgatatatgacaaaactgggcgtttatgttatgacgtggatgaagcgttacgccggagattagaaactaagttgattacaaaaacattaacttttaagttagattctgattggaagaaaatgcagtattctgttgaatcaaaaacaaatgacagagaataatcctgtgtgaacttgataaagaaagaactcacaagcggagggacatattgtgaacgaagaggaaatgagaaaaaagcaaaaagaagatttagaacgaattctcgccttagctcttattaagaatttatataatcagggaaaaatttcagagtatgtttatagaaaaatcaagagtgatacagagaagaaagtggatgttgaaaatagacgttttttgtgataaactcaacatgtaatgacaatgtaggaacacaaccaaggagaatgagatgaaagaaagagtggttgcgatatatgcacgagtgtctaccgaacatgaagcacaaatatcagccttggaaaatcaagtgcaatattacgatgatttatttcgatatcatccggagtggacattatataaaaaatatatagatgtgtagaaccaaactttgatacaatttaatgcggtgtaacgccttgaaatactgtaaataaggcttgcgggatggtaaaaaccatttccgtgagccttattttttatgccgcctgacagggacttgcctccgctgtttggtaggggtgtacggattttgtacacccctgccaaggtggacatacacccctgtacaccccttgagggcaaaattaaaaagtattaagaagtgaagaaaattgtcgttttcactatttttatctgttcacgatatagcttttttggctgtctatacgattttggatcttccaattctattttttactgataccctcttgacaactgtgtttttctgaattataattgaaacatcgttatgaaacactgttattaaagagagaaggtgaacaggtggcaaagcagatcgagggcgtgtatgagaggatactggaatgcgcaaaaaaggaattcctcgaaaaaggctacacagatgctcccctgcggacgattgccgcagaagcggaaacaagtaccaattccatttacgtccgctttaaagataaggaagggctatttgccgccattgtggagccggtttcagaagagttcatgtcccggtgtctggatgtgcaggaaacattccattcttttgacagcgatgtccagcgacgggaggttgggaagtattcttctgatgcgatgcttggaatggtggattacatctacgaccactttgacgaattccgtttgctattggatgcttcccatggcacgaagttctgtaattttgtgaacgggctggtatccatggaagaggaatacacatggaagtggctggaggcaacaggctcccgtctggaacctatgggcgggctgaccgcagatttttatcacatgatggtcactgcatattttgaaggaatctttgaagtggtccgccatgggattgacagggaagatgcgaaaaaatatgtcgccatgatggggaaataccaccatggaggatttttggcaatcgtcggggaagaaacggcggaaacaaaataagttcttaaggctgccagaactggcaacagtcaggcagccttaaaataaaccaataagttagcgaaaactaactaaaataaggaggaactgatatgcagaaacaaaatccgctgctccgcatatggggctggggaaaagacgaacatggcaggctgatcggtgcggtcataagcgcgctcattgctgtcctgctgggaatgctgccttattttgcggcggcacaggttatcatcggtatgctggcttgggaaaaggatctgtccttttatctgccatggttaggtctgggactggcggggtatgccgcacgcacgcttctttacaatatggcattgtccgtgtcccacaaggcgaccttttccattctgaagaatatccggcagagaatactggaaaaactgccgaagctgccccttgggacggtcatggatatgtccagcgggaagatgaagcagatcatcgtggatcaggtggacggcatggagaccacacttgcccatctgttcccggagctgactgctaatattgcggggccacttttcattgtggtctgcctgtttgttctggattggcgcatggcgcttttgtccatcgtgacgctcccggttgggatggcatttatgatgtcggttatggggagttatgcgaagaattatgaaggagcagtgaagactacacaggagatgaacgggactatcgtggaatacataggcggcatcgaggtcatcaaggcgtttaaccagggaaagttatcttatgcgaaattcgcagacagggtaaaggcaaatgcctcctattactacaattggatgaaaaaaagccagttcggagtgtctatgggttattccatcgtgcctgcctcgctggttacaatcctgccggcgggctggctctggtacaggaatggaagcctgccggtggaaacctttatcatggtcatcatcctgtcccttggcattgcaggaccgctcattgccgcaatgaactttgtagacacgcttgctacggtcggtacaacggtggcatctgtggatgaacttctttccgcagaggaacagcatcatggtgacaaggaggtccgtatcaagggtaaggatattgaattatcccatgtttctttcggctaccatgaagataagaatatcctgcgtgatgtgagtctttccatccccgcagggggaatgacagcgctggtggggccttccggttcaggcaaatccaccattgcaaaactcatcgccggtttttgggatgtaaaggacgggacggtttccatgggcggcgtggatgaaaagaagatcccgctggaacagctctatgaccaggtggcatttgtatcccaggataattatctgtttgacgagagcgtccgggaaaatatccgcatgggcaggctgtccgcatcagataaggaagtggaagcggctgccaaagctgcagggtgcgatgcctttatccgctccctggaaaaaggatatgaaacaaatgttggcggaggcggcgcacacctttcgggcggtgaacgtcagaggattgccatagcgagggcaatgctaaaggatgcgcccatcgtgatactggatgaggccaccgcgtatattgaccctgaaaatgaggcagtcatccagaaagcgattgcaaagctggtacggggtaaaacggtgatcgtgattgcccacaggctttcaaccattaaggatgcagataaaattgttgtagtaaaggacggcagaatagaagcggccggaaaacatgaggaattaagaaagacctgccctctctatgaatccatgtggcaggcgcatatcggtgcaaaggacggtgatgtggcatgatagaagcattcagaaaaatatggcggtttgccggcgtggagcgggcaaacatcaataaatccgtagtggtaaaatttttaaatgcagtgttccatatgctggaggtcagcgccatctattttgtgatcgtggctctgacgcagggaaacacaggaaatgatgcggcttggacggcattggcatttatggcagtcagcattatcggcaatgcggtgacgactgctttttccaagaatcagcagacacacgcagggtatttcatggcggcaaatgagaggattaaaatcggcaatctcttaaaaggcgtgccaatgggattcttcaacgagaacagccttggcgaagtgactggcgtatgcaccacggtgcttgggaatattgagatgctggtccctatggtgctggtggatatcatgggcggcctgattgggacggttgtctttacagcgatgatcctgatattcgaatggcgcgtggggctggtcgttgcagcaggcattttcgtatatttcttaattgtctcgtccatggagaaaaagtccgcggctatcgcgccgaatgcacagaagtcgcagacggcactcacctctgcagtcttggaatatgtgcaggggatgggcatcgtcaaatcctttaatttaagcggcaggggagataaaagggcgcaggatgccttggaatttaacaggaagagcaaccttgacatggagaagctgatgacgccttatacaatcttccaggagctggtgctccagattgcggggattgccatgatgttcgtatcaattttctgctgggcaaatggcacgatgcctgttgccaatgcgctgatgtgcattgtgatgtccttccttgtgttcgggcagatcaaattgttcggcatgggaatgtccatgctgcgccttgcctctgcaagcattgaccgtactttgcagacggaaggaatggagcagatggatgagaaaggtaaggcattttcgccgaaaggacatgtgattgaatttaaaaatgtgcatttctcttatgagaacaaggagatactccacggcattgatgtgacgctgcctgacaggacgaccacagcagtcatcgggccttccggctccggcaagactaccctctgcaacctgatcgcccgcttttgggatgtggacagcggcagcgtaaagatcggcgggaaggatgtgcgggaatataccctggagtccctgatggagcagatcagcatggtgtttcagaatgtatatttatttgcggacacgattgagaacaacatcaagttcggcaggccgcaggcgacccatgcggaagtggtggaggcggcgaggaaagcctgctgtgcagatttcattgaagccctccctgacgggtacgatacggtcatcggagaaggcggcgcatccctttctggcggtgagaagcagcgtatctccatcgcaagggcgatgctgaaggacgctcctattgttatccttgacgaggcgaccgccaatgtggacccggagaacgaggaccggctgcagaaggcgattgaggaactgaccagggataagactatcatcatgatcgcacacaggctgaagaccgtgcggaacgcagaccagatacttgtggtggatgaagggcgtattgtccagaaaggaaaacatgaggagctgatcgggcaggaaggcatctatgcggatttcgtacttggaaggaaagaggctatcggctggaagctgaatacataggatttgggcatatgctttgataaagctgtgcagggtgcaggcaggataaggggctgcatggcggctcctgtaaaaagaggtgttatgatggattacagagaaaaggatgaaaggaatatctgctgtgtcctgtgcagtgaatcaggcaggcttccagaatacgggccggaaatacacaggttccgaaatggcaggggtgatgcagaggttgattcctacaaagtgtttccgggaattgagctgaatatttactctgtgcatatggacagttttttcttcggggcagaggaagagggaaactttatggaaatacaccactgccgtgaagggaggatggagcagaggctggaggatgatgggagtgcctatattatgccgggtgacctgtccgttacggtaaaaagacagcgttccagtgaatacagcttccccctctgccattaccacggcatttccatatgcattgataccgatgccgcgccggagtgcctttcctgcttcctggaggatgtaaatgtccgtccaagggaactggcagggcggctgtgcgcagacaaaaactgctttattatccgttcccaggcatatatcgagcatatcttttctgagctgtattcggtgccggaaaaatgcaagaaaggctatttcaaaataaaggtcctggagctgcttttcgtgcttgggagcgtcagcccggaaaagaacagcgcacccgccctttcgctgtcaaaactgcaggcagaccttgccaaggaagccgccgcatggcttgcggagaatttagacaggcaggtatctgtgtctgagctttccggtaggttccatgtatcgcagacccatcttcagaacgcattcaaaggcgtgtatggcgttcccgtgagttcctatacccggattttgaaaatgcagtctgccgccctgcggctgatccatacggacgccgccatattggagatagcctccgaatttgggtacagcaatgcggggaaatttgcttctgcattccagaagatcatgggggagactccgggcgaataccggaaaatgcacagcagccgggaatggcagtgacagccgctccaaaacagcactctgtaaaaagtgctgttttggagcatttttctgttttgatggagcggaaaaggcagaagaaaggatgctataattttactgtgccttgcaaaaggctattatttttgacaataagttagttgttgctaactaaaaaggagatgaagtggaatgagtgtggtgattgtcggagggaatgaatgtatggtccgtcaatataaagaactgtgtagcgagtatcaatgtaaggcgaaaatatatcccaaaatggcagggaacctgaaaaatatcgggctgccggatctgcttgtgctgtttacaagtacggtgtcccataaaatggtacgcagcgcattggagcagatgaaaggaaagccggtaaggacggtccgttcccatacaagctccataaatgcgctccggggaatcctggaagggcatatggaggaaagcggggagggtatgtatgtctgaggaagtattcgtccattactgttcgccgacactggcagggataaaaacggcaaatttattttcctgccgctttgcagacgaagaggaaatgagggacagcgtccgcaggctgaacgtggtccttgtgaaaaaggggatcagggttctgcccctccggtaccgtgacgggtgtgcgcttatttatgcatatcggccgtcaaagctgtcgcaggacttacagcaggctgatgcctgcagtctgttagaaaaacgcgggtacacgtttggcgcgccggaacggtgcattatccagcttatgcagaggctggcggacggcggggaattcccgcacgaaatcgggctgtttcttggctacccgccggaagatgtaagcggctttatcgagaacagggcggaagggtataaatgtgcgggggaatggaaggtctacggcgatgcggataaggcaaaagagacatttgcaaagtaccggaaatgcacggaggcctgccttgcgcagtttgcacagggtaagtctattgaacggctcacagcggccgtttgatatataaaaaatattttaacagaaaggcaggatacatattatggcaaaaatagcagtagtttattggagcgggaccggcaacacgcaggcaatggcagaggcagtcctggaaggcgcgaaggcaggcggggcggaggcggatctgcttacagcttcggagtttgacgtttccaaaatggattcctatgacgcagttgccttcggctgcccggctatgggtgcggaggtgctggaagaaggtgaattccagccgatgttcgattccgtagaaggaaagcttggaggaaaaaagaccgggctgttcggctcttatggatggggcgacggggaatggatgcgtaattgggaggagacctgcaggacggcgggcgcagtgcttgtgtgcgacagcgtgacctgcaatgaggcgccggatgaagatgcgctggaagactgcagggcgcttggaaaagcgctggcataattcatgacaatagattgcaggtgcaatctattgtttcgggaaaggactgtggaagatgaaaaaattgaaatcaagactgctgacgcttgggcttgtgggtatcctggcattgtcgtccgcactggcaggatgcggccagaacccgcaggataacaatccgcagcaggattcgtcagaggttgttggcagcacagaaaataatcagcaggaaacagcagttgaaatcggcagcagggatgattttgcaaaaatatatgatgacctctcagcgtcatacatacttacagcagacattgactttggcggtgaaaccgtgaatccagtcggaatcttcgagccgaaatcagatgcggaggaggatgcggaaacgcccaacacggcgcttgcctttaccggcacttttgacgggaacgggcatactctttcaaacataaagattgacgcggcggataaagacggcgtagggctgttcggatgcatgacaggggaaggctcctgggcgaagaacctgaaagtggaaaatataagcgtaaagggtgggaattacactggcggcgtgatcggctttgcggatttcggctcttatgtagaggggattactctcagcggtaaaaatatggtggagggcagattcctgatcggggggattgccggggcatcccatgcggatatcgtggactgtgaggcagtggcagaccttacgctcacagatgccaatatgcagggggcgggcatcatcgttggcggccaggaagacggcaatcttgaaaactgtactgcaggcgggaccattaccgcccctgacggctgctacagcatcgggggactggcaggctgttttcattgcagcgagtatgcgaaaaactgtaaagcggaaaatataaagattgtgacgggcgataactgctggctgctcggcggccttgcaggacactccgggacttttgaaaatgccccgacgctggtagagaacggcaccgtaaagaatgtgtcgattgaaacgggcaggaattcagagaggatcggagggattaccggagggggattttattctcccatgttcaaagaatattatccggaacccgcaaagtcagatataagttcctgcaccgtttctgaatttactgtttcgggagggaaatatgtcggtgctgctgtcgggtattcctatgggacaacatccgtagacggctttgacgggcagatgacatgggacggctcggaaagcagagagcaggttggcgctgacgaaagcgtgaaactggaggaactgaaataaaaaagctggtctgcggcatttgcagaaacagcaggaaagaggtggcatcgtgcgtataatggttcttgaactgaaagatcaggactcgcccatctttgataagattatggaagtggtgaaatgctgtcctgatattgaacacataaggataaaggatgagccgatgctgtcactgccgggactggaaatctatcccggcaggcgcaagttataccgtgaccgccgggagatcaatcttacggcaaaggagtatgatattctcagcctgcttgtagcgaacagggggcaggtgcttacatatgaccagatatacggtaaagtatggggtgaggatgcgtttggtgatgaaagcaatgctatcgggtgccatgtccgcaatctccgggagaaactttatgaagcggagccggatgcgccttttacaatccgctgcgtgagggaagtgggatactgcttcgaggtggatgaaagtaaataaatattatgacagtggcttgaggaaatcaggctgctgttatttttttgcctgttttaagatgccgttctataggtggatggtatgggtgtccgtcctgtccgcttttttgaaatgtcatgccgtgtcgtaacttgcgttttgctactgcgtttctactgccagcctacgcctgttctacagttttatgctttataatctatacattgccggccgcatgggggacaagccacaatggaaaactgccgtccccggaaaggaaacgccatggaacatatgccgcataaagggacaggcttcatgccgcctaaaccagaacaatatatgttttcgtacataccgcagtccttaaggggattgcggtatttttttgttcgacacggttctatcggtttactgtaaatttcccaatttatggttctatttttcaaaatcagcgtttctgccccggcacaggggagcattcccaaagataaaaaggcagcagccggcctttgacggctgaaaaataatatcggttgtctgagtgcgcaattaggcaaaggatacacataccgtttccgcacgagtccgttatacggattttgtcggaaacgggcggagtaccctctccctgttgcgccctttttctgacgggccgcatccgcagacggcagcacggccctccctgtgtgtccctgcctttccgcaccaggcggaaaggacaatcaatgaagatcaggattctgtatgaagaggacatcaaaaacggggttccgcattacaccacggtggaaatcccggacggggactatgtgacggtgctggagcaggactaccagatgcgccttgcggatgcgcccgaagggaaaaaggataaggtaaaacggtgcggcacactgcaggaactttatgaccgcctcaacaaagagacctacaacgggtggcacaggcatgacaggcacacgctggcggacgcagcgccgaaacggcttgacggcaggaaaggatatgcacgcccggtgaatgaagaggacagccctgcgggtgatgccattgaattgtttgcagacacctccggtgaggcggcaagggaacgcagggaagattatgaggcggtgtgcgccatgctccgcaggcatctgaagcccgaccaggcggagcttcttatcgctgtacatattgacggcatcccaaaacaggaatatgccgcccgcatggggatcactccgggtgccgtatcccaccggctgaagaccgcggagaaaaatttcagaaaaatttttccgtcaccctcaagttttgacccttcccgtggctaataaacaggggcgttggaaaatgccccggaaatggaggatacgggcatgaagcacaatctgagaatcagtgtttcaaagaagccggtttccggcgggatcgtaagctgccgtcatatctccgtgagggagcgcctgctgcgtttcctgcttggggataagcagcggctgaccatcatcgtgccgggcgattccgtccgggagctggcaatcagtgaagtcatggaaggaggaaacgtacatgggaaaagtgaagttactgcttgacgtcatcggggacctgcgctcccttgcggacagcctgcaggccgttgcggacgcggtggcgtacagcgatgcggcaggggcggagatgaccaccacgaaggagccggaggaaacagggaaagcgggaaagaccgggaaggctgccgcaaagaatacggcaaagaaggaagcaaaggcggcaaagcaggagccggaggagaagcccctgacgctggaggaagttcgtgcggtgctggcggagaagtcccgctccggacacacggaggaagtgagggagctgcttgcaaagcatggagcggataagctgtcggagattgacccggcggaataccctgccctgcttgcggaagcggaggtgctgtgatgggaagacacgctttattgtcagcatcctccagccaccggtggcttgcctgcccgccgtcggcaaggctctgtgagaactatgaggataagggcagcgaatatgcgcagcagggcaccgacgcccacagcctgtgcgaacacaagctgaagctgtcccttggcatggagaccaaagaccccactgcggggctttccttctacgatgaggagatggaggaatgcgcctgcgggtatgcggaatatgttctctcgctgatcgaggaggcaaagaaaacctgcaaagaccctgtggtgctgatcgagcagcggctggacttctcccggtatgtggaggagggctttggcaccggtgactgcgtcattatagcggacgggacgctgtatatcatcgactacaagcacggcaagggcgtggaggtctccgcagagggaaatccgcagatgatgctgtatgccctgggtgccttggagctgtttgacggcatctatgacattgagaatgtccgcatggcgatctatcagccgcgccgggagaatgtcagcgtgtatgccatggcaaaaggtgaccttcttaaatgggcggagggcgaactttcggaaaaggcgaagctggcctatgccggggagggcgagttctgcgccggggaacactgcaaattctgcaaggcgaaggcggtctgcaggaagcgggcggagtacaatctggagcttgcgaagtatgacttcgagatgcctgccacgctggaggatgacgagatcgcagcgatcctcgtgaaagcagatgagctggcggcatgggcggcggatgtgaaggagttcgcattgcagcaggcgttaagcggcgtgaagtatgccggatttaagattgtggaaggccgctccaaccggaagtacacggatgaagatgccgtggcggataccgtgaagaaggcgggcttcgacccgtatgagccgaagctcctcggcatcacggccatggagaagctgctcggaaagaagaagtttgcggaaattttaaagggccttgtggagaagccgcagggcaagcccgcgttagtgccggagagcgacaagcgcccggagatgaacacggcgcaggaagatttcaaggaagattaggaggaaaatcatatgtcaaacacagccaacaatccaacgaaagtgatcaccggcccaaacacccggtggagctactgcaacgcatgggaagcgaaggcaattaacggaggtacgccgaagttctccgtgtcgctcattatcccgaagtcggataagaagaccattgcgaaaatcgaggaggcgatcaaggcggcttaccgcgagggcgaggcgaagctgaaagggaacggcaggagtgtccctgccctttccgtgctgaagaccccactgcgtgatggggacgtggagcgtccggatgatgaagcctatgcggattcctatttcgtcaacgccaacagctccacggctccgggaattgtggatgcggaccgccagccgattttagaccattccgaggtgtacagcggcgtatatggcagggcgagcatcaatttctatgccttcaacagcaatggaaataagggtattgcctgcgggctgaacaatttacagaaaatccgtgacggggagcctttgggcgggcgttcccgtgcggaggatgactttgcggatgaagccggggatgatgaggatttcctgtcttaacggcataacgggaacacactgccgggtggcggggagaaggcggcgaccttttccctgccgcccttaaggcggtgaaaggagctggtggaattgaggtgtatcagtattgatattgagacttattcggatgtggatttatccaaatgtggtgtttataaatatgcttcttccccgaattttgagattttgctgttcggctattcggttgacggcggggatgtgaaggtggctgactttgcctgcggggaggaaatccctgcggaaatactggcggcgctttccgatgagtccgtcaccaagtgggcgttcaacgccatgttcgagagggtatgtttatcaaattaccttggggagtggctggagccggaatcatggaaatgctccatggtctggtctgctacccttggcctcccgctgtctttggaaaatgtgggtgcggtgcttgggctggagaaacagaagctgtcggagggcaaagacctgatccggtatttctgcgtcccctgcaagccgaccaaggcgaacggcgggcggacgcggaacctgccggggcatgaccgggagaaatgggagcggttcaaggcatacaacctccgtgacgtggaagcggagatgcagatacagcagaggcttgcaaagttccccgtgccggagttcgtatgggaggaataccggcaggaccaggagatcaacgaccggggcatcggcgtggatatggagatggtaaaaaatgcaatcgccatggacgtgcgctccaaggcggagctgtctgccgccatgaaggaactgacggaactggagaacccaaactccgtgcagcagatgaagcagtggcttttggagaacggggtggagacggactcgctggacaaaaaggcagtggccgcaatgctggaggatgcgccggagcctttgaagactgtgctgacgctccggcagcagcttgccaagtcctccgtgaagaaataccaggcgatggagaatgcggtgtgtgcggacagccgggcgcatgggatgtttcaattctatggagctaataggaccggccggtatagcggaaaaatcatacagttgcaaaatctgccccagaaccatatccctgatctggcacaggcacggggactggtggaagccggggattttgatgcccttgccatgctctatgaggatatcccggatacgctctcgcagctcatccgcacggcttttgtgccgcagggcgggagaaaattcattgtggcggacttttccgcaatcgaggcgagggtgcttgcgtggcttgccggggagaaatgggtgctggatgtgtttgggaaaggcggcgacatctactgtgaaacggcatcaaggatgttccactgcagggtggagaagcatggcgagaatgcggaactgaggcagaaagggaagcaggccgttttgtcttgtggatatggaggatcggtcggtgcgctgaaagcgatgggtgcactggaagcagggatgacggaggatgagctgcagccgctcgtggatagctggcgggaggcgaaccccaatatcgtgcagctatggtgggatgtggaccgtgccgcgaaggaatgcatcaaaaagaggatgcccacagagacacacggtatccgttttgattaccagagcggcatgatgttcaccacgctcccatcgggcagacggctcgcctatgtgaagccgcgtatcggggagaaccgtttcggaggggagtccgtcacctacatgggtgtgggcggcacaaaaaaatgggaacgcctggaaagctatggtgcaaagtttgtggagaaccttgtgcagggtattgcccgcgacatcttatgccatgcaatgcagacactgaaaaactgtgcgattgtcggacacatccacgatgagatcatcatcgaggcggacaggaggatgtccgtggaggctgtgtgtgaacagatgggcaggacgccgccctgggcaaaggggctgcttttacgggcagatggatattcttgtgagtggtatcagaaagattagggggtgtgcgatggaacggctgcggattgaatacgggacgggatacatggatcttattgtggaggcgttcttcccctgcaagatgccggcgatgaggaaggccacaaggctcatcaattcatactgcacggatgaggcacggacggaactgctttcggaactgcgggagatggcggacgggtacaaggccctatgcgatatgtacaggcagaagatggaggagctttcggaggagtcggctgcgtaccgatactggagggcgcagttcaacaaaacagaaatcctccgcagacggatggaaaataatatcagactaatttcaggaggcggaaagggatgagcagggcggcaatgcaggggtgcagggcgcatgatgactgtttcgcaaacagcggcggcgtctgcacctgcctaaaaaacaatgactttggcgggagggactgcccgttttacaagcctgcggacacggtccggaaagagaaccacaggcaggatggaggcgcgttttatgggaatcagcaggtacaacagtgagggatacagcgacccgaccagccatgcggctttgtcgggaatcaggaaggaagaaagggcggcgaaacgggcataccggccgcttgtctatatatgctccccgtttgccggggacacagaaaagaacacggaaaaagcgaggcggtacagccggtttgcggtgaagaacggggcgatcccgtttgcgccgcacctgctgttcccgcagtttctggatgatacaaagcctgcggagcgggcaattgggatgttcatgggtatggtgttgcttggaaaatgtgagcagctatgggtattcggcggcaccatatccacggggatggcggcggaaatcgagaaggcggaaaagcgggatatgcccatccgctatttcacggagcaatgtgaggaggtaagcagggcatgaaaatgactttttacacggcgaactgcagggggaatgcgaagaacagcctttaccccaacaggcgcgtcattgacaatgaggatgattgcatggaggtggtggcgttcgaccatgtgtgtgcggaatttaagaactgccgcaggagcggggataacttcctctcctgcgatgtggacgtgatggactgcgacaattcccattccgacaacccggaggactggattcatccggaagacttggataagaaaatcgggaaggatgtggcgttcgttgtggtgccgagccggaacaacatgaagctaaaggaggggaagtccgcacggccgaggttccatgtgtacttcccgcatgatccaatccatgatggggaggcgtgcgccagtctgaagaaagccatacagcagaagttcctgttttttgacgccaaggcgctggattctgcacggttcatcttcgggcatcctgtggattccatcctctggcatgagggcgagatcactatcgactgcatcgtgaagccgcagggcggcagggaaataccgcaggggcagagaaacgccaccatgtcccattttgcggggcgcgtggtgaagcggtacggcgcaacggaaaaggcacatgagattttcatggacgaagccaataagtgcaatccgccgcttgaggatgcggagcttgccatgatatggcagagcgcctgccgttttgcggaaaaggtgcaggggcaggaggggtatgtcaccccggatgcgtacaatgacgagttcgggcgggagtccttaaaaccgggcgattactcggacatcgggcaggcgaaagtgctgaccagggagtacggcgtggagctgcgctatacggcagccacggattacctgcgtttctgcgggcagtattgggtggagtccaagcagcaggcagtgggcgcggcagaggaatttttagacctccagcttgcggacgcaaaggatgagatcgcccggacgaaacaggcgctcatggacaccggcatttcggaggatgccatcacctccggcggcaagtcgctggagaagaagatcagcggcgggcagatggacgcctaccttgcgtatatgtctgcccaggcatatagggcgttcgtgatgaaacgcagggacatgaagtatgtggtttccgcactgcaggcggcaaagccgatgctggagatcagcgtgtctgacctggataaagacgggttccttctgaacacgccggacggcacttattacctcccggacgggctggatgggaagcgcgaccacagcccggaggactatatcacaaaaataacggcggaagctcccggcggcaagggggagaaactgtggctggattctttaaacactattttctgcaaagaccaggagctgattgattatgtgcagcagattgtgggcatggcggcggtggggcgtgtctacatggagtcgctggtcattgcctatggggaagggaggaacgggaagtccaccttctggaacacgatagcccgtgtgcttggaacctacagcgggaatatgtccgccgacaccctgaccgtggggtgcaagcggaacgtgaagccggaacttgccgaggcgaagggcaaacggcttattattgctgcggagctggaggaagggatgcgtctgaacacttccgtggtaaagcagatgtgttccacggatgagatttttgcggagaaaaagtataaggacccgttttccttcacgccgagccacaccctcgtgctttataccaaccacctgccaagggtgggagcgaatgaccctgggacatggaggcgtttaatcgtgatcccgttccatgccaggatagagggagcgggggatgtgaagaactatgccgatttcctcgtttcggaggcagcgccggcggtcatggcgtggatcattgagggtgcgcaaaaggcaatcagccgtaacttccacatcccttctccggcctgcgtggaggaagccatcaaatcataccgggaggacaatgactggcttgggcatttcctgagtgagtgctgtgaaatggcgccgggttacacggcgaagtccggggaggtctaccaggaataccgcagctattgtctgaggacgggcgagtatacaagaagcacggctgatttttataatgcgctggagtctgcgggtttcaaaaaacagaagaaaaaggacggggcatatattttgaaaatgcgcctgaaacccactgattttgcggactgacaggcttaagggtgacggtcggtgatggtcttggtataaaccccctttagggcagttttttcagtaaaaaatcacttatagaggagttttaggtacgggtgtcaccgaccgtcacccgaaagcctggaatgcttgaaaaataaagggattggaggcatttgcatgagagagaagaccatagagcagaaattcagggcggcagtcaaggccgccgggggcttggcagtaaagttcacatcgcccggttttgatggggtgcctgacagaatggcacttctcccggatgggaaaatggcgttcgtggaggtaaaggctcctgggaaaaagccccgccccctgcagctttcccggcacaggctgttgcggcagttgggatttaaagtgtatgtactggatgacgagtcgcagatcggagggatgattgatgagatacagtccacatgaataccagaaatttacagcagaatacattgaggcgcatccggtgtccgccatcttcctggactgcggattagggaaaacgagcatcacgctgacggcagtcaacgacctgatgtttgacaggtttgaaatccacagggtgcttgtggtagcgccgatccgtgtagcttcttacagttggccggcggaaattgaaaagtgggaccaccttgaggggcttaagtacagcgtggcggtcggaacggcggcggagaggctggcagcactgaagcggaaagcagatatttacctcatcaaccgtgaaaacgtacagtggctgatttccgagagcggcataccgtttgatttcgacatggtggtgattgatgagctgtcatcctttaagaaccaccagacgaagcggttcaaggcattgatgaaagtccggccgaaggtaaaacgcatcgtggggctgactggcacgccgagcagcaacggactgatggacctgtgggcggagttccggctgctggacatgggggagcggcttggccggttcatcgggcagtaccgcacctcctacttccggccggataagcagaacgggcaggtggtgttttcctacaagcccctgcctggggcggagaaacagatatacggcaagatatccgacatcacgatttccatgaagtccaccgaccacctgcagatgccggaactgataaattccagatacacggtgtatctttccgggaaggaggattcgcactatgcggatttgaagaaagacctcgtcctgcagctgccggacggcgatatcacagccgccaacgccgcatccctttccgggaaactgtcgcagatggcaaacggcgcaatctacacggatgccggggagacggtcgccatccatgagcggaagctggacgcactggaggacatcatcgaggcggcaaacggcaagccggtgcttgtggcatactggttccggcatgacctggaacgcatcacggaacggctgcacaaactgaaaatcccatgttcccggctggacacggacagcagtatccggaaatggaacgctggggagatcccggtggcgctgatccacccggcatccgccggacacggcctgaacctccaggctggcggttccacccttgtgtggttcggccttacctggtcactggaattataccagcagacggtggcgaggctgtggcggcaggggcagcaatcggaaaccgtggtggtgcagcacatcatcaccaagggcaccatagacgagcggatcatgaaggcgttatccgaaaaggacaccacgcaggccgcactgatcgatgcggtgaaagcagaccttaagatataggcggggagagccgcctccagtcaaaaagcaaatcagagccaatcaatgaaaatcaatgacaatctttgaaaatccgggggaagcaaatatattttgattggaggcatggcttatgagcattatctggaagtaccttgacaaacggtcggcggccgtggatgcgctgaaggattacagcaatatgaaatttatcatcgaacacacggatgatgagataaaggcggcatatgagaagatgggcggcgtcagcagcccgcagtctgacggaatgccccgcacgcacaatccccatgctgtggaggacaggatgataaagggcatcgaggagattgatgtgctgaaagagcgttaccgtcaggcggcagaatatatggcatggttccttccggcatgggatgagctttccggggatgagcgctatgtgctggaaaccttttattccgatgaggagaggcagacggattccgtttacgacatctgcgaccgtttccacatcgagcggacatccgcatacaagaaaaagaaccgagcccttcagaaactggtcacgctgctgtatgggaaaagctgatgtccaaaatcgcggacgattttccatattggacgtggtacactgttatcatcgaaaactgcataaaaacagccggccttcgtgggaacagccctgcgggggctttctttatgcccgaaggaggtgaggcagatgccaaggaaaccgaagaggccgtgttccttccccggatgcccggagctgacggacgggaggttctgtgaggagcatgagaaacaggagaaccgccgctacgagaagtacgaccgtgacccggctgtacgccgtaggtatgggcgtgcctggaagagaatccgtgaccgctacgccgcaaagcacccgttctgtgaggagtgctacaagaagggcgtgctgcatcctgttgaggaggtacaccacaagctgccgctggcagagggcggcacgcatgacgagggaaaccttgtgtcgctgtgccagccgtgccatgcaaggattcatgcggagcgcggtgacaggtggcataagcattaatttattttatgggaatcagtgctgtgttgatttatgctgtggaggtttctgctgacccggaggggcggtcggaatctctacagcatattttctgtggaacgggcgtggggtgtcacgcacaaaaaccggaaatcaaacgggggattgccccgctctgattttccgcattccataggctttttaggtgctgcggcgtttgatttccgcagcatttttttcaaacaaaatcaaagaaacggggtggaaacagtggcaaaagacggcagcaaccggggcggtgcaaggccgggggctgggcgcaagcccaaggcgctcacggaaaagatcagcgaggggaaaacggccgcggtcatgatggagcctgccgagctggagggcgtggatgtgccgcccgtgaaagacttcctgaaatccccgcagaagagcgggcgggagctggtggcggaggaagtgtaccaggaaacctatgtctggctgaaagcgaggggatgtgaaaagctggtcaccgtgcagatggtggagcagtacgccatgagcgtctcccggtggattcagtgtgaggagatcgtgtcctccacgggcttccttgcgaagcacccgaccacgggggccgccatcgcttccccttacgtttccatgagccagtcctacatgaaacagaccaattactgctggatgcagatataccagatcgtgaaggagaactgctcggtggaattccagggcaacacgccccaggatgatgtgatggagcggctgctccgcgcaaggaaaggagtgtagataaaaatgggaaaaacgacaaccgagatgcagctcatccctttggggaagctggtgccgtatgtgaataacgcgcggacgcactcgccggagcagcttgtgaagctccgctcatccctgcgggagttcggctttatcaacccggtcatcatcgaccgggatttcaatgtcatcgcggggcatggcaggattgcggcggcgaaggaggaagggatcacggaagtcccgtgtgtgtttgtggactatctgtcggaggcgcagaaaaaagcctacatccttgcggacaaccgcatggccctggatgccgggtgggatgaggaactgctccgtattgagattgaaagtctgcagggcgcggattttgatgtatcccttacgggcttcggtgaggatgagattgcagacctctttgccggggacggtgaaaaagatgtgaaagatgatgatttcgacctttccgcagcgttggagaaagcggcgttcgtggagcggggcgacatctggacggtgggcaggcacaggctgatgtgcggggatgccaccagtgcggaggatgtggcggcgctcatggacgggaagaaggcaaacctcatcgtgacggacccgccctatggagtctcctttaagagttccggcgggctgaccatccagaacgacagcatgaagggggatgaattctacacatttctgtacaattcgttcttgtgcatggtggagcatctggaaagcggcggcgcggcttatgtgttccatgcggacacggaggggctgaatttccgtaaggctttcgtggatgcagggttccaccttgccggggtgtgcatatgggtgaagaattcgctggtgcttgggcgctcggactaccagtggcagcatgagcctgtgctgtacggctttctgaagaacggcaagcacccgtggtattccgaccggaagcagaccaccatctggaactatgacaagcccaagcggaataagaaccatccaacctccaagccgctcgacctgctcggctacccaatcagcaattcctcccaggagaacgccatcgtcctggacactttcggagggagcggctccacgctgatggcgtgtgagcagacgaaccgcatctgccacatgatggagctggatgaaaagtatgcatccgtcatcctgcggaggtatgtggaggataccggggattcggagaatgtgtatgtggtgcgcggtgaagagaaaatcccatactctgcactggtgaaggaggtggagacggaatgaatgcagacgctatgtatacccatagcagggagcctggctcttgcggcggagacacaccaaatccgcagtctgcggattcccgcctgaccctcggcagcctttttgacggctccgggggtttccctttgggcgggctgcttgcgggcatcacccctctgtgggcatcggagattgagccgttccccatccgtgtgaccacgaagcggctgccgtttgtgaagcacctgggagatatttctgcggtggatggcacagggattgacccggtggacatcatcacgtttggctcgccctgcacggatatgtcggtggccggcaagcgggcggggcttggcgggcagcagtcctgcctgttctaccaggcaatacgaatcgtaaaggaaatgaggtgtgcaacagatggaaaatatccaaggtttatcgtgtgggagaacgtccccggcgctttctcctccaacaaaggggaggatttcaaagcagtcctcgaagcggtctgctccgtcaaaggcggggatattcctgttcctggacctccaaaggggaagtgggcgaatgccggaagcatcgtggcagacggcttttccctcgcatggcgcgtccttgacgcacaattttggggaatcccccaacgtaggaaacgaatctaccttgtcgcagattttgcaggcgggagtgccggaaaggtattatttgagtccgaaggcgtgtctgggtattctgcggagggcttccgtgcgtggcaaggagctgccggaggtgctgcggattgcactggagcggcaggcggcatctgcttaaacgaccagggcgggcagcggatggatgtgacggatgacgtgacctgcaccctgcgggcagaggcgcaccatcccccgtgcgtattggaatcggccggtttctgcacggagcattccgcaaaggcgcgtgggatcgggtatgaggaggaaacctcgcccacgctccgtgcagggacggtcccggctgcggtggcgctctatgagaaccattcgcaggatacgagatacacggggcctttggatacggcgcctacggtcagctccacctacggcatgggcggcaataaccagccgttcgtggtggaaacgccaaagacgctgaaaatccgctccggctgtgagggcggcggcaaaggggcgatcatacaggatgacaaatccgcaactctctcctgcaacaatgaccagacggtgttcgtgcctttctgcaaggggtgccgcgcccactacaaaggggatgcgccgacctggaaggacgggaaggtggcaaacacgctgaacacctttgatgtgggtgagagccgctgcaatgagctggtggtgcaggcatacggcatctgctccaaagacagcaatgccatgaagtcagataacccgcacagcggattctatgaggcggacacttcccggacattggacgggaacggcgggaatccctcctgcaaccagggaggcattgccgtggtgtcggtgcagggctccatgatcggcagggacgataagaacgggccgcagggcagcggggtgaatgaggatgtttccttcacgctgaatgccacggaccaccatgcggtggcgtacccgacttactgcacaagcaagaattcccatttcacgcgggcggaaaaggagctggcaaatacgctggtggctacagattataaagacccgcctgtcatcaatgatgtacagacggcatccggcaaggaggtgttcggcacactttccgcaagcatgggctccaagcagtggctcggcaaccaggaggcgttcagcggggactaccatattatggagccggagtatatcgtccgcaggctgacgccaacggagtgtgcaaggctgcagggcttcccggactggtggtgcagcggtcttgggacggaggaacccacggaagatgacctggcgttctggcgggaggtctttgaggcccacaggaggattgcggggacttccaccaaaccaaagaccgataagcagatcatcaaatggctgaaagacccacattcggattccgctgaatataagatgtggggcaacggcgtcgcgctgccgaatgtttattttgtgctttcgggcattgtgtattacgcacagttcccggactttttattgtgacattttttctcacatactgcttgctattcctgcggtttagagtgattaatgtagtaccgaaaaacgaaggagggaaacacaatggaaacaaggtacaacgtaacaggagaaaagcggaaggaaatggtggaggtcatttccggggttgttggaatgagggcggtttatatgaggatgccgacctgcgcctacgctatcagcaacattaccgtaagcagggatgggacactggcatgggatgaacgcacagacagcaggacaatagaaaaggtaaaggaagcattggcggccgcaggcttcactgcggaggaaaccgaagaaacggcgcaggaagccggcacggaggaagaaaccgcagagccggaaaaccatgcagaggagccggaaactgcgccgcagggggcggatctggggcttacggtggcaatgccgagggaatccttcacggatgccgcgctggagaacctgcggaggctggtggacgcaaaaggaagcctgattaaaaaggcgctggcggttgacagcctcccgattgagacggacggggagaaagtttccttcccatggttcgcggagggacaggacagcgagtcggtgaaagcctacacccatttcattactgccctctgcgacatggcgaggaaccagaagcgcatcacggcaaaggaaaagcctgcggataacgaaaagtacgcattccggtgcttcctgctccggctcggcttcatcggggcggaatacaagggggaacggaaaatcctgctgaagaacctctccggcagctcggctttcaagaacggcgagccaaaaagtgaaacactccggccggagccagtcaatcctgccatgcgggtggatgccggagagcatccggaactgacggaggaactgcttgatgaggtactgatacagcaggtcaacgcagggatgggaggtgcagcagatgggatttccgagtagggagattgtggagcgcgtccgcagggagtaccctgcagggacacgggtggagcttgtgcggatggacgatgtgcaggccccgcctatcgggacaaagggaaccgtgacgggagtggatgacaccgcaagcgtcatggtcgcatgggacaacggcagcagcctccatgcaatttacggcgaggataaaatacggaaggtaccgcaaggaacggaaaggaagggatacaggaatgaatgcaaaacaggcttttgagaaacttggatacacgcaggtgagggaggatgacgactacatcatttatgaaaaagagattgacggcggggatggcaaaaaggtggtggatttctgcagccagttagaaaatttcagggtgagctttgaaagcgggatagatacgccaagcgttgacatggagcttttcaaggcaatcacggcgcagcttgcggaacttggctggatgcagtaaacccggctgcgccatgccggataacctgccataaaatacacaaattccgccgcaaatcattgtgtaatatatgcctcgaattgacttgctattatccccttttagagcgaatatgtgtactaccgaaagggaaaacacacaaagaaaacggaggaaaacagcatgaacgaaaaattagcaaggcaggttgaggaaatgaaaaagcagaccatcggggttgaggtggagatgaacagcatcgcaaggagcagggcggcgaagattgcagcggacttcttcagaacagggcgctacgaggatacggcaaggcggaacggctactacacctggagcgcatgggacgcgcagggcagggagtggaaattccaaaaagatgtgagcatcacagggccggacagcgaaaagtgcgagctggtgacgccgatccttacctacgcggacatcgaaaccctgcaggagctcatccggcagctgcggcacgccggagcgaagagcgacgcgggaaggggttgcggggtccacatccacatcggggcaaaaggccacacgccgcagagcctgagaaaccttgccaacatcatggcaagccacgaaagcctgattgcggacgccttaaaccttgacaggggcaggatgaaccgctactgccgcacggtagacccacggtttttggagcaggtcaaccggaagaagccttccacgatggcggcccttgcggacatctggtacacgagccacggcgcaaattacggcagaagccagcattacaacgacagccggtaccatatgctcaactaccacgcaaccttcaccaaaggcacggtcgaatttaggctcttccagttcgacgagccgggtaacgggcgcaggggcggcctccacgcagggcagctaaagagctacatccagctctgccttgcactcagccagatggcgaaggaagtcaagagcgcaagcccgaagccgcagcagagcgagaacccgaaatacgccatgaggacctggctcctccggctcggcttcatcggggacgaattcaagaccgcaagggacatcctcacaaggaggcttgcaggggatgcatccttccgcaacggaagggctgcttgaagggaacgcgggaggtagcctcctgccaccttgcctgccacggaaagggcagcggaccgctacggcggtcttaaggtggtagaagggtgcccccttcggaaaggatggatttcaaaatggaaaagagatactacattgcttacggctcaaatttaaacatccggcagatgcggatgcgctgccctggggcgaggattatcggcacttcggtgattgagggctaccggctgctgttcaagggaagcaggaccggctcctacctcaccatcgagccgcaggagggcgcaagcgtacccgtggcggcctgggcggtgacagaggaggatgaggcggcactggaccgctacgagggcttcccgtccttttattacaaaaaggagatggagctgccccttaaagggattaagaccggaaaggtgcggctgcggaaggttttcgtctacatcatgcatgaggaccgcccgcttgggattccgagcgagttttatatggagacctgcaggcagggataccagagcttcggttttgatgaggcatttctggaacaggcgtatgccgacagcagggaggaatttccgggcgggtggaagaccggggatgcctgcttcatggtgaccaaccggaagaacggctacacgggcaactacactgtgctggggttcgatgggaaatatttccgactccagaacagcaggggcagccgttaccgcgcatccgcggggaggatgttccgcagcaagggggaggcgcttgccccacggcaggaaaataaggacgcaggaggaaacagcgatgaaagaaacagataatattgcgaggatttcggtctgcccaaggtgcgggcagacctaccacgggaggccggcagtttcgcgggcggacggcagaacgccgctctgcccggactgcggcaccagggaggcactggagagcatcggtgtggacgggaaggagcaggaacagattctggaagccatccacaggtgctacggcaggggatgaaaattacaaaggcaaaggagcgtaaagttatgaaaaaaaggacagaggtcatccaggagtggattgatgcaagaagggaacggggcgaggctgcaacaaagtgtatgttttacatcacggtcccgaaagacaccgacctttacaaggatgaaaccatcaaaaaaatcgagggcatccttgataagaaccatgtcagccacggccatgtggatacggtctgcggcgcatggaacctgaaccgggactggattgagaccggcgggatcgactgcattgtggaattctgcggggtgtacccggtcagttgggacatggacgatgtggcggagcttgaacggatggaaaccgatggggagatcatcgtgctggttgactggatagaggacgggaagcacatccccaaccattaaaactacacaattcccgctgtggatatttgtgcagatcatggcccgaattaacttgataatatgtgcttttagagcgaatatgtgtactgccgaaagggaaagcaaaaacacaaaacggaggtacgcaccatgaaaaagaacatttttgaaacggcatacgcacagatgcaggaacttaagaaagcctatgacgcagcaacggacgaggcggggaaggaaaaggccagggctgaataccatgtcctgatggagggcatagaggggcttggggcggctgcctgccgaatctggagggaatacgaaaccgccagggagaacggaaacgcccgccttgacatcagcgaggtggtctgggagaaggatgtggaaagcctcatctcctgcatgagggagaacgggatcagcgagtttaccttttcctccggatggagtagcgcagtggagaccgcatggctttttacgcagaacggctgcgaactggccgggctggtcgaaataaacgggagcatgaaccattttgcagggaaacacgagaaaaaacacggataccttttcagggtaaaatagacaccgccaagccaaaggagccggaaggctcttttgtccgtgtcagatatacacaattcctgacgcagatatttgtgtagtttatgctccgaaacagcttgctattatcggcagaaagagcgaatatgtgtactaccgaaaggaataacaaagccgcaggcttagaaaacggaggaaaacagaatgctgaacaggaaatttgaaggagccacactttacgagatcgactacacaccgaaggggacaaagaccatgaagaccgtttcggtctgggcgaagaaccggctggatgcatcaaactacatgatactgaaccacatttggggaaagcagcatgagatcagggttgcgaccgccaacctgctgaaataaggaggggaacggatatgcggagagaaggaagcattaaggttaacagcagcattttccattactgggtgaaatattacgatgaaccgagtgaggagtacggcattgacggcggacggatttccaaggcgatgctgaagcgggatggtgagattgtttataactatgacagggggctggatattgcgcctgcagatggggatacggatattgcgctggcaatcctcctgaaagattacaactaaggagtttgaaactggaaattccaagagcggagccgcaaggctctgtgtcttgtactgatagattatggcttgccgctggcaggccatttttgagtatgacgggcatgtccgtgttctgtggtgcaagtccacataggcgtagctaccgacgaacttgtaagcgactcccaaggtttgcatcgtgaggtgtgggcgagaagaagggatagcgaaatcgtagccctacggacagaaacccgatattaaggcgtacatggtgggtaagttgacttaaagcaacgaagccctaaaggtagccgtaacccatgtgcgtaaatcgggagggtagacgaggaaagaacacggacttatcccgtgaggtctcacaggcggtttcatcagccgtagtaacaacgaactgtgagaagtcagcagaagccatagtaggagaaatctgaagggctgaacaatgtaaccgtgcagacgaatgtatgtacctgtgagtattcgacaagcggatgtaggcgaaacgtatatgagctgtaaacgcataaacataggacaaatcacagggagcggaaaggagcgaagcacacaaagtatgtcggaattgttggaaaagatactggagaaaaagaacatgaacgaagcatataagaaagtctgtgccaataagggtgcaggcggcgttgacggcatggaactggaagaacttgatggatttatccgtaagaactggaacagtatcagggagcaaatcagaggaaggagttacaaacctcaacccgtgaggcgtgtagaaatcccgaagcctaacggaagcaaaagaaaacttggaataccgacagtcatggacagggtaatccagcagggtatagcacagataatcagccctatgtgcgagccgctgttttcagaccacagttacggattccgtccaaacaggagctgtgaaatggctatcaaagatatgctcatgttcctcaatgagggatatgagtggatagtggacatagacctagagaaattcttcgataacgtaccgcaggataagttgatgagccttgtccacaacatcataaatgacggagatacggaatcgctgatacggaaatatctgaaagcaggagtcatggtgcagggcaggtatgagaaaacagaacagggaacgccgcagggtggcaatctgtcgccgctattgtctaatatcatgctgaatgaactggataaagagttggaaagacgtggattgcgcttcgtgaggtacgctgacgactgtgtaatagcagtcagaagcaaagcaagtgccaaacgtgttatgtattcgataacggactggatagagaggaagcttggtctgaaagtaaatgcagataaaacacacataacaagaccaatgaacctcaaatatctcggctttggattctggaaagattccaagacgaaagaatggaagtgcagaccacacaaggattctgtgcagaaatttaagaggacgttaaagaagctgacagaaagaagaaaatcaatggcgtttgcggaaagggtaaaacagctcaacagggtaatccgaggttggataaattactttgcaataggtaggatgaaaacagcaatgaccgacatagacgcacatttgcgtacaagactgcgagtaataatctggaaacaatggaaagtaccgaagaaacggcagtggggattgcagaagctgggtataggaaaagaccttgcaagacagacatcatacatgggagaccactatcaatggatagtaacgaaaacctgtgtagtcagggcaatctcaaaagaaaagctgaaacaggcagggcttgtgagttgctacgattattacatggaacgtcatgctttgaagttatgttgaaccgccgtatgccgaacggcatgtacggtggtgtgagaggggagatttaatctcccctactcgattgccatcttctggaggtgatgccgatggcaatgcggaaactgaaaaagtataagccgacaaagttcaaggcaaaggacagccgctatgataaggatgccgccgattttgccgtgatgttcattgaaagcctctgccacaccaaagggacatgggcggggaagccttttgaactgatcgactggcaggagcagatcatccgggatattttcggcacattaaagcccaacggctaccgccagttcaacacggcctatgtggaaatcccgaagaagcaggggaagtcggagctggcggcggccgtggcgctgcttttgacctgcggtgatggggaggaacgcgccgaggtatatggctgcgccgctgaccgccagcaggcaaccatcgtctttgatgtggctgcagatatggtgcggatgtgtccggcgctttccaagcgggtgaagatactggcatcgcagaagcggatcatatacacgccgaccaattcattctaccaggtgctttctgcggaggcgtattccaagcacggcttcaacatccacggcgtggtgttcgacgagctgcacacgcagccgaaccggaagctgttcgatgtcatgaccaagggttccggggacgccaggatgcagccgctgtatttcctcatcaccacagcggggacggacacccattccatctgctatgaaacacatcagaaggcaaaggatattctggaagggcggaagattgacccgacattctaccctgtgatttatggcgcggatgaggcggacgactggacggacccgaaggtgtggaagaaagccaatccctcgctgaacatcacggttgggattgataaggtgaaagccgcctgtgaatcggcaaagcagaaccccggcgaggagaattccttccggcagctccgcctgaaccagtgggtgaaacaggcggtgcggtggatgcccatggataaatgggatgcctgcgctttcccggtttcagaggatgggctggaggggcgcgtctgctacggcgggctggacttgtcctctaccacggacatcacggcgttcgtactggtgttcccgccgctggatgaggaggataaatactgcatcctgccgtacttctgggtgccggaggaaacattggagttgcgtgtccggcgcgaccatgtcccatatgatgtgtgggagcggcaggggaagctgatgaccacggaggggaacgtggtgcattacggctttatcgaaaaatacattgagcggctcggcgagcggttcaacatccgggagattgcctttgaccggtggggtgcagtgcagatggtacagaaccttgaggggatgggcttcacggtggtcccgttcgggcagggcttcaaggatatgtccccgcctaccaaggagctgatgaagctggtgctggagcagaacattgcccatggcggtcatccagtcctccggtggatgatggacaatatcttcatacgaaccgaccccgcaggcaacattaaagctgacaaggaaaaatccacggagaagattgacggggcagtcgccgccatcatggggcttgaccgtgcggtgcgctgcgggaaccaggtatcggagagtgtctatgactcccgtggattgctggttttttgattcttcaccagtctgtacacattatctttgtcggttccttatatggctattttccgcagattcctttatgctgtctggcgaaggaggtggaaggatggacgataagggtttccttgagcttatcatttcggaacggatggggatgcaccatgatgcctttaaaaaggaatatccccctacggaggaacaggcggcggaagcggaaaaagcaggccgggcacatgagctgctgtttcagcagttaagcgcggagcagagggaaatgatggagctgtgcgaggatgcagcaaattcggaagccacacgggaaaatgaatattactaccgggcagggttccgggacgggataaaccttgacaggctagtaaaacagttcaaggaaggaaaataaaaacacatactgcgggcaggcagggggcatcgcttcggcggtgccttttgcctgtccgtttttcggaaaggagcgtggttcctatgggattattcagcgggttgtttagggcgagggatgcgcctacgaaccgcacatcgggcagcgcctacagctttttcatgggtggcagcacaagcgggaaaagggtaaatgagcgttcctccatgcagatgacggcggtgtactcctgcgtccggattctgtccgaggcggtggcggggctgccgctgcatttttataaatatacggataacggcgggaaggagaaggcggcagaccacccgctgtattttctgctccatgatgagccgaaccctgagatgacttccttcgtgttccgggaaacgctgatgacacacctgctcctttgggggaatgcctactcgcagatcatccgcaacggcaaaggggaggtcattgcactgtacccgctgatgccggacaggatgacggttgaccggaatgaaaaggggcagctctattattcctacctgacggggaacgatgatgcgccgaccatgaaaggcagcaccgtaaatctgtccccttcggatgtgctgcatatccccggactcggctttgacgggctggtgggctattcccccattgccatggcaaagaacgccatcggcatggcgattgcctgcgaggaatacggggcgaagttctttgccaacggcgcacagccgagcggcgtgctggagcatccggggactttaaaagacccatcaagggtaagggagagctggcagtccaccttcggaggaagccacaacgccaacaaggtggccgttttggaggagggcatgaaatatacgcccatctccatttccccggaacaggcgcagttcctggaaacgaggaagttccagatcaatgagatagcgaggattttccgtgtgcctccgcacatggtgggcgacctggaaaagagcagcttctccaacatcgagcagcagagccttgagtttgtgaaatacaccctcgacccatgggtgtcccggtgggagcagtccatggcgcggtctctgctgacaccggaggaaaagaagcagtattttgtgaagttcaacgtggacggactgctccggggcgactaccagagccgcatgaacgggtacgccgtagggcggcagaacgggtggatgtcggccaatgacatccgggaactggaaaaccttgaccgcatcccggaggagcttggcggcgatctgtaccttatcaatgggaacatgacaaaacttgcggatgcaggcatttttgcaaaggatgcgtccgcacagaacggaaaggaggaatccgatgaaaacgaagaagttctggaactggaggaaggcgaagaaccaggagccgggagcgacagagcgggtgctggaactgaacggcaccatcgccgaggaaagctggtttgacgatgacgtcacgccgcagcttttcaaggatgagctgaatgccgggaacggggacatcactgtgtggatcaactcgccgggcggcgactgcgtggcggcggcacagatttataacatgctcaccaactacaaaggaaaagtaacagtgaagattgacggcatcgcagcaagcgccgccagtgtgattgccatggcgggcgacaccgtcctggtatccccggtttccatgcttatgatccacaatcccgccaccattgcctggggcgaccatgcccagatgcagaaagccatcgatatgctctctgaggtgaaggagtcgatcatcaacgcctatgtgctgaagacggggctttcccggccgaagctgtcgcacctcatggatgcggaaacgtggatggatgccaacaaagcggtggagcttggctttgcggatgagatcatgacacgggcaaaggcagagccggaaaaggagccggaggaaggcggaggcgccggtcccaaagaagatgaggaagatgaaaagaaatttccttccgcgccaagttccatgctgttctcccgcagggcggcaaacaatgcccttttaaataaactggccgccaaatatggaggggaaaaaccgaaagcagatatccgggcgcaggcggaaatccctgcgccggaaacagaaaccggccgttccgtggacgcactcatggagcggcttaatttattgagacattaagaaggaggatttcattatgacgattctggaactgcgtgagaaacgcgcaaaggcatgggaggcggcaaaggcattcttggattcccacaggaaggagaacggcgtcctttccgcagaggatgatgccgcatacacgaggatggagcaggagatcaccgaccttgggaaagagattgcaaggctggagcggcaggaggcgcttgacgcggaactgaaccgcccggtcaacaaacccctcacaggaaaacccatgaacggtaagctggaggatgacggcgaggggaagacggggcgcgcttctgatgagtacaagaagaatttctggaatgcaatgcgctccaaggccccggtgccgaatgtcaccaatgccctgcagatcggcacggataccgagggcggctaccttgtgccggatgaatttgagaacacgctggtggaggcgctggaggaggagaacatcttccgccagatggcaaagatcatccagacctccagcggtgaccgcaagattcccgtagtggcaaccaagggtacggcatcgtggatggatgaggagggggcatatccggaaagcgatgactccttcgggcaggtttccatcggcgcttacaagctgggcactatgatcaaggtttccgaggaactgttaaatgacagcgtgtttgaccttcagtcctatattaccagggagtttgcccgccgtatcggttccagggaagaggaggcgttctttacggggaacggcacagggaagcccctgggcatccttgcggccacgggcggcgcagaaaccggcatcactgcggcatccgcaacggcggtcactgccgatgagctgatcgacctttattacagcctgagatccccgtaccgcaggaacgccgtgtggacgctgaatgattccaccgtcaaggcgatccgcaaactgaaggacggcaacgggcagtacctgtggcagccgggcattacggcgggcgcgcccgacatgatccttggccggccggtcaggacatccacttatatgccggaaatcgccgcaggcgcaaagaccatcgcctttggcgacttttcttattactggattgctgacaggcaggggcgcagcttcaagcgcctgaacgagctgtttgcggccacggggcaggtgggtttccttgcttcacagcgtgtggacggcaagctggtgctgccggaggcagtgaaggtgctggcacagaaagcagcctccggttcataaaaagcagttattgaaattttaagggaagggggcggctggcatggtggtgacgctggaagaaatgaagaactatctccgtgtggattatgacgacgacgattccctcatcgggcatcttttgcagtcggctgaaaaaatctgcatggacatcatccgcacggatgacaggagtgtgctggaaaaggatgaaaacgcaaagacggctgtcctgtatgccgcagcttacctttacgaacaccgggaggaagccgaccaccacgccatgatgctgacgctgcgggcgctcctttccggcagccggaaggaggcgttctgatggaggtttcccttttgaatgtccgtatcaccttccagaaaaatgccgtagaggtggatggcattggcaaccacaaaaacacatggacagattattattcctgccatgccacggcaggcggcgaggcggggaagaagaccagtgaaacggatgtggccgggactgtggcggatgaatcggatgtttcgtttactgtccgctggtgcaggaaggcatccgtgattgattccacaggattccgggtggtatttggcggggaactgtacgacatcctcgccattgaccacatgaactataaaaagaaatgtttgaaattcaaatgcaggaaagcgaggcggtgacgatggcaaacggcgtatcgattgaccggatggcggaggagatcatgaaggggctgacagaatatgcggaccttgccacggaggatgtgaaaaaggcggtgaagaaagccgggactgcggtgcgtaaggatattgaagccaatgcacccaaggacaccgggaagtatgcaaagtcctgggcggtgaagaccacaaaggaaacatccaattcactggaagtgacggtgcattccaaaaaccgctaccagctttcgcaccttctggaacacggccacgccaagcggggcggcgggcgcgttcccgcaaagccgcatatcgcggcggcggagcaggccggcacccggcagcttgaaaaagagatacagaaagcattggagggataggctttgaaaacattactggcacttttgaaggaaaccggcatccccttcgcctatgaccattttgcggagggcgaatcgccggagccgccgtttgtctgctacctcctgcctcagagcggcaatttcgccgctgacggcatggtgtacttcaaggcgagcggcgtgaagatagaactgtacaccgacaccaaggacccgtcggtggagaagaaactggaggacgcgctggataagcggcgcatcttctacaacaagtcggaggtctggattgccagcgagaagctgtacgaggtcctctaccagtttgacatggaggtggtttacgatgccgaagaagaataaagtgaaattcaatatctgcaacgtgcattacgcgctgctgacgctggaaacggacggggcggtgtcctttggcacgcccgttgcgatgcccggcgccgtttccctttccctggaccccaacggcgagccgagcaatttctacgctgacgggtacgcctattacacggtcagcaacaacatgggctatgagggggatttggagcttgccatggtgccggagagcttccgcaccgatgtgctgaaggaggcgctggatgagaacaaggtgcttttagagaatgccaacgcggagacggagaacttcgccctgctgtttgagtttgacggcgatgtgcggaaaatccgccatgtgctgtacaactgctcggcggcccgcccgaccattgagtcccagaccaacgaggaggagatcgaggtacagaccgagacgctgtccattacggcagcgcctttggcgagtggctatgtgaaggcgaaaaccggggacagcaccacagacgaggtctaccagaactggtacaagagcgtgtacctgccggatgcggcagcaggtgggaatgcagatacagaaacaggcggtactgttgatatgggaggggagggttaatgtatgagcatgaaacagaatatcgagattgacgggaagcaggtgcctttcaaggcatccgcagccatcccgcgcatttaccggatgaagttccaccgggatatttacaaagacctgcgttctttggagaagtccatcggtgacggggacgaggaaagctccaaccttgacctgttctctctggagatgttcgagaacatcgcctatgtgatggcgaaacacgcagaccccaatatcccggacagcccggaggaatggctggatgaattcaacacgttctccatttaccaggtgctgcccaagctgatacagctatggggtttaaatgtgcagacggatgtccagtctaaaaaaaacttcgcccgactgaccgggaaatgaccacgccgctgttcctgctccggtgcgtacagcttgggctttccatccgcgacctggatttacttaccatcgggatggtcaacgatatgttcgcggagagcaggaatgacgaatacaaaggctataaggaaatcgctacccaggaggatttcgaccgcttttaggcggcgtccccctgggtttatttccgcattttaacaggaaggggtgtccgccgtggcgaacagaatcaagggtatcactgttgagatcggcggggataccaccaagctacagaccgcattaaagggagtcaattcctccatccgggatacgcagtcgcagctccgtgatgtggagaaactcttaaaattggaccccggcaacacggagctactggcgcagaagcacagacttttgggcgaggctgtggcagggacgaaggaaaagctggagaccctaaagaccgccgcagagcaggcaaacacggcccttgccaacggggaaatctcacaggaccagtacgatgccctccagagggaaatcatcgagactgaaaacaatctgcgtgatctggagcggcaggcagggcagtccgctgtggcattgcagaaaatcgccgccacgggtgaaaagctgaagaccgtgggggataacatttcctctgccggtcagaaactgctccccgtcacggcaggcgttacggctttggggacggcggcagtcagcacggcggcaaactttgaaagctctatgtcgcaggtgcaggcgacaatgggaatcacaaaggatgccatgtctacggtcaacggcgagagcgtcaatacgatggatacgctttccgcactggcaaagaagatgggcagcgagacagcgttctccgcaagcgaatgtgcggaggctctgaactaccttgcccttgccgggtacgacacgcagcagatgtgcgacacgctccctacggttttaaaccttgcagcagccggcggcatcgaccttgcggcggcatcggacatggtgacggacgccatgtccgccctgggcatgggcgtggatgaggcggggacgatggtcgaccagatggcgaagaccgcctccaccaccaatacctccgtggcgcagcttggcgagggcatccttaccatcggcgcgaccgcaaagaccgtgaagggcggcacggcggagctgaacacggcgctgggcatcctcgccaacaacggcatcaagggcgcggagggaggcacacatctccgcaatgtcatcctttccctgcagaaccccaccgacaaggcggccgcctgcatggagcagcttggtctggacgtttacgattccgaggggaatatgcgctccctgaacgacatcctcggagatttgaacacgagcatggacggcatgacggcggccgagaagagcaacatcatcgggcagattttcaacaagaccgacctgtcatccgtgaatgccctgcttgccaacacgggaagcacatgggatgacctgcagcagtccatcattgacagcggcggcgcggcacagcagatggcggacacacagcttgataacctgcaggggcagatcaccattttaaagtcagctttggaagggctggctatttcttttggggagcttctgctgcccgccatcaaaatgattgtcggatgggtgcagaagttcgtggactggctgaacggcatggatgaggggacgaagaaagtcatcaccacggtcgcattactggcggctgctctgggacccgtgctgattgtcgtcgggaaagtggtgtctgtggtcggcacgattatgaccatagtgccgaaggtggcgggagtgattaacacagtcaagaccgcttttgctgctttgaacaccacgatgcttgcgaatcccatctttctcattatcgcagcgattacggcgctggtggcggcgtttatctatttgtggaatacgaatgaggatttccggcagttctggatcaacctctgggaaaatgtgaaagaggtcgccattgccgtatgggaggcaatcaaaaacttcttcacggcggcatgggaggccatttcctccacagcgcaggcggtgtggaatgggatcaaggatttcttttccgggctgtgggaagggataaagactatctttagcacagtggtggaagtgataaagaccatcatcaccacctacttcaatatttacaagaccatcatcacaacagtgctgaatgcaataaagacggtattcacgactgtgtggaacgggataaaaaccgtggttaccacggtagtgacggcaatccagacctttatcaccacggcatggaacgccatcaaaaatacagtcacaacggtgctgaatgcgataaagacggtcatcacaacggtgtggaatgccatcaagtccgcggtcacgactgtggttaatgcgataaagaatgtgatttctaccgtttggaacgggataaagaacacggtcagcactgtggtcaacggcataaaaaatacagtttccacggtgttcaataacatcaagtcctccatcagcggaaccatgggcaatattgtgtctgtgataaagagcggctttaacaacgccatcagcttcatcacaagcctcccgtcaaaagccctgcagtggggcaaggacatgatcatgggcattgtgaacggcattaagagctgtatcggcgctgtgggcgatgccgtgagcagcgtggcgaataaaataaaatctttcctgcacttctccgtgccggacgaagggccgctgaccgattacgagagctggatgccggacttcatgaaggggctggcaaagggcatcgaggacagcaagagcatggtggcaaaggctgtggacggagtggcggcagatatggtcctgaatccttccgcagccgtgcaggagatttctgtatccggaaacggcggtgacggtgtgtcgcagggcggttccataaacggcccgctgatcgaggtgaaggaaatgaacgtgaggagcgaagaggacatccgcaaaatctcacagcagctttacaggcagctccagcaggggcggcgggcaaacggatattcgtaggaaaggggtggacagatgggtttttcgtttgacgggatatcatcaaagagcatgggtatcgcaagccgcatggctacggagaaccgggtgccggaactgaaaaaccgcaccatttcgatggcgggaagggacggcctgattgacctgggcgcctccctctcggaacgggtgatagaaatttcctgcttcatcccgccaaagctgacagcggcggaactgctccggtgcaaggatgagattgtaagctggctgagtccggataaaggggtgtgcgaactgaaacttgacacggagcctgggcgggtatattacgcaaggcttcagaacggcgtaacctttgaacgggtggtgcgtctggcggcgaccttcgaccttgcctttttctgtccggaccctttcggctacgctgtggaggatgaggtttttaacattacgacagcgggaaaccacacggtgaggcggaggcttgggaatttatattccaaccctgtctaccggctgaaaggtgtcttggcatccggggcgggcagatacatcagcattgccacaaacggagcagaactgaggattgcaaatgcggttttatctgtatcagaaatattggtggttgacacagcgaaaatgacggcatgggtggaggacgcggaggggaacacgctccgcaatgccctgccgtatatcggcgaactgaactttcctacgcttgaagcggggctgaacacggtggaggtggctgtatcaagcgccacgttcacggaacttgaaatacaggcaaagagccggtggaggtgatttcttatgggtttacaggcagtcttaaacacacagacggatttcacgggggaattccccactgaatacgcaaaggacggactatggcgtttcaatgaaaatgccccggatgcggataccatgctcgccgattcctccgggaaaggcaggaagatgtttgtttccggatggtcgggtacgagcgccggtttccgcaacgggcagaaggggcggcatttccgcatgaacatcacaaaccccgcttcggagaaaacctatctgaaggtaacgaatgacggcgccatcttccaggacattggggagcggatcattgtgggcggctggatgaaccccaccacctattccatcggcaatacttacacaccgattttcaataccaggcaggggccggggcagccgattttctacctctcccttatccgtggaaagccgaggattatgctgtataactccacaggctccctgatactggatgagtcggtaacaccaccttttgcttttgcgaataacggatggtacttcattgcctgcgtgatagagcctgacaataaaaaggcgcagtatgtcataggtgaccgggaaagcggggtggtatggacttctgcggccctgtcctttacgggggagctgaaccgctcctgcacggcagaccttatcatggggatgcacgccggctcctactggtacgccggcggatttgacgactggtttttagactgtgattcacagcttacagcggatagccttgcggattatttccgtgccacaatttttgccaacggcggcgatactgcaggggaagtagatgccctttctattccagatggcgtgacgctgcggaagggaagtaatggtgcgtacccggaaagcggcgttctgtatacccgtgctgtggaatacgggctgtccggcaccggaaaaatatctgtctcaggcgagtgcgtcccaagagtgactgacattccccttgtggaaacatccacgagcagcgacctcattagctggagcgattgggcggcggtgggggcggatgggaagatgccgtcccctgcccgcgcctacatccgtttccgggtgacgctcacgacagcggacgcggcgaggacgccgaagctgacggacatccagatttatgacattccgaagtccccttacgagaagatcggttatgcccgcccggttgtcttggactcaaacggggcatgggaggcggtgctggaaaacgcctacggcatcatcgtgacgggggaggtgaacggcgaggatacgctttccttctccatcccctttgccgacgccaagcggaagtatatcgacaatgagaagaaaatccagattgtggatgacgtatacatcatccgcacggtcacggacagcaaggatgcttccggcaacgccgtgacagaggtgtacgccgaggcggaattttacaaccttgcctattccgtccggaaggaggagaaagcctttgacgcggaaacggcggatgcggcaatggcctacgccctttccggcacggaatggaaggtcgggacggtcacggtcaccacgaaacgcacatggacatccacggagaaaaacgcactttccatcctccggaatgtagcagacctgcacggtggcgacctggtctttgactgcccgaaccggctggtgcatctactcatcctgaacgggaaggacagcggcgcgctgttcatgtacgggaagaacatgaaggacattgagcggacggtggacaccacgggccttgtcacgaggctttatgccgtcggtgcggacggcatgacctttgccagcatcaacggcgggaagccttatgtggaggatttcacctattccaaagaaatccgtgtatcttcccttgactgctccgcattcacgaacccttaccagatgcttgaatttacccgcatgaggcttgcggattactgcaagccgaccgtctcctatgtgttgaacgccatggatttatccgttttgacgggttacgagcatgaggcgtgggagcttggggattatgtccgggtggaggataaggatttggggctttcggtcaccacgaggattgtgcggagggaatacaacctgcaggagccgtggaatacggtgctggagctttccacggtgctaaagaacctgggcagctccacgagcaagtgggacaatgccgctgattcattggagggcgtcagcgtggtgtccagcgaggacattgcggagttggtgccgttcaacctccttagaaattcccgcgccgatgacgggcttgcctattgggtatcctccggatttgaggcggacggggaaaacggggcaagcggcacggcctccttcaaggcggaaggggtggcaggcatgactaaaagcctgtcgcagacggtgtatcctgccaaccgggacagctacaccatctcagcgcagattgcgtccgagaaccttaagaaactgagcgggaattcgcaggtcggcattgagattgtgctggaatatgaggacggcagcacggaatcaaggtttatcgacctatactgacgggagggatttttgtggcgtatttttcaaggacaacagcaaagattgtgccggaaaacttgtcatccgagaggctgaaatccgtcaccgtccgcatctgcatcacggactgcacgggtgacttctacatcacggatatcctcttgcagggcgggccggtggcaatggggtgggtggggcatccctcggaactgaggtggacgctggatggctgagtttgtaaggcttgcggaagtggtcaacaagaaaaaggatatgcgcatcgtgagcgtgacggtgattcccaccattgccgactgttccgggcgtatctggtttactgacctccaactgcaggaagggccgggccttacgggatatgccccgcatacggaaacctgcctgcagaagttccgggaggatggggaaataaaggctcccgtgtggttcaacggcgtggtgcgctcggaagaaacggtggttcttttcaatatggggaagaccgctgccccgttagacatccacatctacccgaaatccgatatggcggcggggacggtgcggctcgcccagggcgtgggtggccagagggcggtgttcccggaagctgtgaaggcggaggatgacattgcgctgcttgccagtacgagggaatgcatgaagaatggggttccggagaaaaaggaaggattctaccagtacagcgccgcatgggattccaaacacaaggtaacgctggaaagcgggaaaacggcgcggctgttatttacgatgcaggagatgcaggaagggggcgggacattctgatggacacactcaaaggcaaacagatcatggtatggacgttcatgggcaatacaaggatgtaccaggcgctccgggattacggcgaccgcatcagccagattgggctgttttctttcaaggtcagggcaaccggggaaatctatgagagcggcgtttccattgcggaaggctccaccatgcggacatatatcaggaagtggccgcacatcaagtggctgctgaccgtggcgaatgacggcacgaacagcattttcaaggctctgcgggagaacacgggcggggcgcaggatatgttcctttcggagcttgtgcggatcatggagaaatacccgtggtgtgacggcgtggacatcgatttggagaaaggggatgattactccacagcggcgaagtcaaccgctatgttccgaaatatttacaatatggtgaaatcctacaatcccgcaaagctgatgaacatctgcctgccggggatggacagcattaacggctctgtcggcggggagaactggtgcgtctacagcgacctcgacaattactgcgacacggcatccattatgagctacggcatggcgtgggcgggcagcgcaccggggccggtctccccgcgttcctggctggagggcatctataattacgccgtgaaagtgatgaatccggataaagtgttcctggggatgcctgcctacgggtggaactggcggatacacgacacgccagagaacatgggcgtcacctaccgggggacttccaacacctactatgccgcgcagctatggatgacgggcggctacaacttcacggatgacaagccgccgcagccgtttatccccatcgtggcttattgggacgactacgacaaggtgccgtgggcacttccccatgtgtacgactacatggaggggcgggatgcagtttcctatgattacccgctgctttccggcacatacaaccgcaggcattaccttaccgcctacggcaaggagcagaagacggaatttggaaatatcattgttgaccgtagcggcggaagcccggacagctattccggcatagtggctgtatcggagggcatggtgacgatgggggataacggctccgcctcttacagtttttcggtgtcttcggcggggacttatgatatcgccgtgcgtctgtgcttccccttctgggataagaacgggatatatatttccattgacgggagcaggaagtatttcacggaaagccgcctgtggtggccgtactggagaagcaccttctggtcggcgctggcagaggggatatccctctccgcagggacgcataccatcacggcctcggtggatgtgaaaggggtgcagttttacggttttcgtgtgtgccagtccttcactgaagaaccgagtgccggctccgccacctacacgcttgcgccgcggaaatttaaggacgttaacggcaacatggcacagccggacagaggcttcaagctgacgctggagatgctccgcaggaagccggactcggtgctcatctggtacgaggacttccgtgatgagaaccccctgccggaaagctattggacgatgctctccggcaagtgggaggtgtggcgggagggttatgagaaccggccgtactcccagcttgaggggagcgggcagcttgcatggaagtacagcggcttttccgacatccacctgcgggcaaggctggcattcccggcaaatggcagcgggaaggcgggggtgttctgcggggatgtattctgctgcttaaattatgacacgcagagggtggagctttacaagggttccacccttcttggcagttacagccagaccatcagccggacggcgaatgcagacctcagagggaatccaaccatgtacacggtggagatgcgcatccgggggaacagggttcgtgtttattccggtgcgtcctatacgctgcggtttacggcaacaatcagcggcttttccggcggatatgccgggtaccgctcggataaccgtaccgtctgcgaactgatgaggcttggggatgcatggacgtatgagccgtatgagcggtttgatgtgcggatgccggacagcagttttaaatctttcggccggatcagccggagcagtgcggcgtgggatgaggaattccaagtattcacgctgactgctgatgtggaggaaagctctacccgcagcgaggacatttcgatggattacgattttttccattcggatttgatggaactgtcctgcgggaacaactacacggcagaagtcataccgaaggacatcaatatctggatttcccgtctgttccttggggatgcggacggcttctccatcctctattaccaggacgtggactcgctggtctattgggcgaaccaggcggcgtaccgctggaaactgcgggggatgtgtatgtggtcgcttgggcaggaggacatgaggctgtgggagtggctgccgaagcagacataaaatacacaatttccgccccggatgtttgtgaagtatatgctccggaataacttgataatatgtgcattcagagcgaatatgtgtactaccgaaagggaaaaaacacaaaaacggagggaaacacaatgacaagatttgagagggaaataagcggcagccttggggcattctggaagaagaacgcagaggaggaagtgaggaaagcggtggcgcaggcagacacgcaggccacggtcgatacggacggcgcaatcagatggaaaagcaacgggcggtacctgatggacgatttctgcgaaaagctggaatacgcaggctacgcttttgacagggaggctacggcaaagaaacgggatgcacagaatgaggagagccttgcacggtaccgcagagatgacagggggctttccggggaggctcttgcggaagcaggggcggcatttggggaagggacaacggtggtaaacgtgctgaccggagaaaaaacaaggctttaaagcaaaacaaaatatttccaaggaaactggcggatgtccacagcgggcagccgcttttttcatacacaaaaatcttttaaaggagggtttcactatgaagggattctggaacacgatccaactcattttcactgccaccggagggtggctcggctatttccttggcggctgtgacggcctgctgtatgcgctgatcgcttttgttgtggtggattatatcacgggagtgatgtgtgccgcagcggataagaagctgtccagcgaggtggggttcaggggcattgcaaagaaagtactgatctttttgctggtggggatcgccaacatcctcgatgtgcaggtcatcggcacgggcagcgttttgcggacggcggtcatctttttctatatttccaatgagggcgtgagccttttagagaacgccggacacctggggctgcccatcccggagaagctgaaggatatcctggcacagctccatgacaaagcagaaaagggggacgagtaaatgaaactggtagaaagcattctgacaaggaacccctgctatacggcagggagaaagatcacggtaaaggggctgatgctccattccgtgggctgcccgcagccaaaggcgtccgcattcatcagttcctggaacagcgcgtcctatgacagcgcctgcgtccacggcttcattgacgggaacgacggcacggcttaccagacattaccgtggaaccacaggggatggcactgcggctccggcagcaagggcagcggcaacaatacccacattggggtggagatgtgcgaaccggcgtgtatcaagtacacttcgggcagcaattttacctgctccgacacggccacggcaaaggcggtggcgaaaaggacttatgagacggcggtggagctgttcgccatgctctgcgaaaagtacagccttgatccgcttgcggacggcgtcatcatcagccacagggagggatgtgcgaggggcattgccagcaaccacggcgacccggagcatttatggacgcagcttgggatggggtacacaatggattccttccgtaaagcggtcaaggcagcgatgggcggcactgcttctggcacagacagatacaccaagatcatggggaatgccgcggcaacggcggagcagatgcaggcatatctgaaaaagaagaacccgtccgtggcgcagtccgtcctcgacatggttccgctgtacctttcggaaggaaaagcagaaggagtccgtggcgacattgcctttgcacagtcctgccttgagaccggcaattttaccttttccggctctgcggtcacgctttcccagaataatttctgcggcatgggcgtgacttccaatggtatgaaggggaattcctttgacacgccgcagctcggcatccgggcgcaggtgcagcatttgaaagcctacgcctccacggatgcactgaagaacgcctgcattgacccgcgtttcaagtatgtcacgaggggctgtgcggaatatgtggagtggcttgggcagaaggaaaacccggatgggaaaggatgggcggcgggagccggttatggggagaaaatcctctccatcctgaaaggcatcctcggcatggcaggcggcacattgaagcctgcagaagcctggtaccgcgtccggaagtcgtgggcggacgcttcctcgcagaaaggggcgttcaagtcgctggataacgcaaagaaatgtgcggatgaaaatccggggtattctgtgtttgatgaaaccgggagagcagtgtacgctagggcggcggcgttccagccgtaccttgtgcgggtatccatccctgacctgaacatccggaaaggtccggggactgactacggcaagaccgggaaatatacgggaatcggtaccttcacagtggtggaggaggcagacggcggaggcgcatccaagtggggattgctgaaatcctatcaggaaaagagaaacggatggatttcgctggataatgcgaaaagagtgtaactgagtatcggaggacagaaaaacaagcccgtggcatttgaaacgatgctgcgggcttgttttgcgttctgcggttttaatctgttttctttggtgcggctgacaagtgcagcggctttgccatcagctccacgcagtccgaaaagccgagcagataggcaagagcgccgtaccgtgcgccgagtgcgttctgtccgcaggagtgcaggtcgatcagtgaccgtgcttcctgcggcagttccatggcctccagcctgtctaaatattcccctgacttccgggcaatttcctggtattccgcatccttttccaggatgcggtccagtatgccgtttacccgcatatccatcagcagatacagtacagaatccttatccatagcagaatccctcctttcctcggtgatgcatattacttctgaaggcatgggatatcaactcaattttgatgttgagggggcagtttttctataagcagcgtattgtgacagggctgtgataaggctgtggtcaaagtctgaaaattctgcaaatcattttccatcctattgacaaaagcaaggtgtaagaggtatacttaaaattgagttagcggctactaacacaaaacggccgcattttttagagatatgagttagtttttgctaactgtgattaggagagaaaaggagggcgttttatggtgaagataacggtgggaatagaaggaatggcctgcggtatgtgcgaggcgcatatcaacgaggctgtaaggaacgcctttcaggtgaagaaagtgactagctcgcatacaaagaagcagacggtcatccttgcggaaacggacatcccggagcaggaactgaaaagcgtggtggcaaaggcgggatatgatgccgtatcggtaagcagtgagccgtatgagaagaaagggctgttcggaaggtttgggaggtgacgccatgcagacggaagtgtttcagggcatcctgataccgttccttgggacaacgctcggctccgcctgtgtgctgttcatgaaaaacaggctgaaccaaatggtgcagagggcgctgacgggatttgcggcgggcgtcatggtggcggcatctgtctggagcctgctgatcccggcaatggaacagtcggagcctatggggaaactgtcgttccttcctgccgcagccggcttctggctcggcgtccttttccttctgatgctggaccgggcagtcccccatctccacatgaacagcagcaaggcggagggacccaaaagcagcctgcagaagcaggtcttattggtgttggcggtgacgctccacaacctgccggaaggcatggcggtgggcgtggtctatgcagggtggctttccggggatgccgggatcaccgccacaggtgcgctggcgctttcccttgggattgcgatacagaatttcccggaaggggcgatcatctccatgcccctgcgggcggagggcgtcagcaagggaaaggcgttcctttacggtacgctttctggtgcggtggagccagtgggtgcggcgctgaccatacttgcggcgggatttgtggtcccgctcctgccgtatcttctgagctttgcggccggggccatggtctatgtggtagtggaggaactgatcccggaaatgtcggaagggaagcactccaatgtggggacagtgctgtttgcggcagggtttacggtcatgatggcgctggatgtggcgctgggatagtcggagcagaggtttttgtttcctacaggcaggcaaaaaactgaaacgccatggaggatgctatgaacttttatgaatttggagaattaaataaacctgtaattatcctgttgccgggaacctcctgtcattggaaggcaaattttgaggaagttatcccgcttttggaggaggatttccatgtggtgtgtgcgtcgtatgacggttttgatgaaacggagaaaacagtctttcccgatatgctgacggaaacggataaaattgaaaaatatataaatgaaaatttcggaggagaaatccatgccgcttacggctgttcaatgggcggctcctttgtcgggctgctggttcaaaggggaaatatacatatttgccatgctattttgggaagttccgatctggatcaggaggaggggctttccgcaaaatgcaaggcatggatgataagcaggatgatttcgggtatgttccgaaaaagcaggctgccgggatttatgcggtggtggataggaaggttccctgcaaaggaacaggcgtattacaaaaaaatgctggatatgttcggcgtaggaaatacccgcatggcttttgtgaagagggaaagtatccgtaatcaattctattccgatctggttacgccgataaaaaacgggatatccgtacccggtacaactgtccatattttttacgccgtaaaaatggggaaacagtatctggaaaggtacaagaagcattttaaagcccccgatatccgccgtcatgatctgcagcacgaggaactgctggtctgttatccgcaacagtgggcggatgaggtcagaaattgctgcagaatatttccgaaaaacagtaaaggaaaaaaagaaaatgagcagacatgatgagatcaaaaacgcatataagagcctcggcggggaggcgacattctatgacgggatgatcacctgctccacgctgcccggaaaggcagtctgtaagctggtatggaacatggataaaaggaaaaacgaccgttatctggagcttgcgctttcaggcataccgcagggctttggcggcaggatgctggaggttccggtggggacgggcatactcactatgccggtgtatgaaactctgccggatgcagacattacctgcctggattactcgctggatatgatggagagggcagaacgtcaggcagaaaagcgggggcttaagaatgtctgtttcaggcagggcgatgtggggagcctgcccttccctgacggcagttttgaaattgtgctgtcgctgaacggtttccatgcttttcctgataaggaagcggcttaccatgaggttttccgtgttctgaagccgggagggatattctgcggctgtttttatgtaaaaggtgaaaataagcgcaccgattggtttatcgaaaaaatatatacacctagggggtactttacaccgccctatgaaacggcacacagtttggaaaaacggctgaaagccatgtaccggaaagcggaagtgaagactgtggagggaatggctgcattccggtgcaggaagggcagcagcgatggaaaataggatgaagcgtatacatttttgttttcccggaagggatgatgaggctcctgttgccaataggctcggcgctggccgtagggctggcatttaaggcggccagggcctatccgaaagaatgcagggccacccgcatggatattgacaggcgcattacccggacaatcgcggagtggagaaaggaatgcgcatgaaatacattggaatgcccatgggtatgtggacgttgtttggaaaatcttttgaaaggaacctgctcacagagtttgaactggacagggacacggcaaaggcggtggcggcaaaagcaaagccacggtataaagagattattgccgggctgccggaatttgaaaagggagaccattttaaaatgaatatcgcaggctgcgccctgcttgccgctttcgtgctgaatatgccggagcgtcccgatgtccggcggctgacagcatattattccgattccatgatgactccggccatgaagtggttctgccgtaagagcggaaaatccaagttcaccaaaaaggatatttcctcaatgaaagccaccgaacggttaagggctgcggacaggaacccctattcgtggaacatggttttttatccttatccggacggcagcggctatgaagcccgatttactgcctgcggcatatgcaccctgatgcgggagctggaactttatgaccttgtccctgccatgtgccgtctggattatacaatggccgaggcgggcgggacctcggattttgtccgggagtatacactggcttcgggcggtccgtactgcgactgcggatataaaaagaagcggaagggaaggtagtgtcaaacgatttatgaaaaaactgccctctttctctgctcttagagaccattatatttatgcttcgcaaatccctgtcaagcctgaaattaacgggctttcagcccgggcttgacaggaatttggaagcaaaataactggtcactaagagggagaaagagggggtaaaggcaccgataggctgaaacccttgattttactggggttgaagcgattttggggtagtagacttgacactaccgaagggaaatggaaggaagagaaaatgaacatatcagttttcatcattgagtgcataattatggcggtgttatttggtattttggtattcgggatgctgtttgccagtcccctgacctttatcagcgattatcctcccgaaatccaggaagaatattaccgttcgcagaacagggaagcagcgaaaaaaacgctgtctaagattatggcggtcaagaagattgccgcattgcttgtattactatttctgttcacatggatggcgcataaagccggagcggaaacgttcgtccaggggctgcttgccgcttacggatatatgattgttcttgctgtttttgatacctgtttcctggactggattctttttgcgaatatcaggagggtccgccttcccggtacggagcatatggagaaggaataccaccagaaatggttccatgtaaaagtaatgctgccgctgctcccggtgttcactttgggaggtgtggcaattgctttagtgatgacatggctctggtaggaaaaaggaggaattcatgaaagaaaaaggcaacaaaggcttttgggacagatgggcgaagcggtatgattttatgatgtcaaaagacagcaggacctatgcacagattgtgaatcttatgaaaaggaagttggacagggagatgactgtgctggagcttgcctgcgggacggggcttctgtcagtgcggcttgcgggaagcgtgaagctgctggaggcgacggatttttcggaagaaatgatacggcaggcaaaggcgaaagcgcacagctcccgcctccatttctccgtgcaggatgccacaaaccttccttacacaccgggaacctttgacgcagtggtaatttccaatgcgctgcatatcatgccggaaccggaaaaagccctggcggagatcagacgggtgttaaaaccgggcggcatcctgattgcgccgaccttcacggcggctggcagcctgtccggcaggatgaggatacggatcatggagctttccggatttaaagtattccataaatggacgccgcagggatatctggattttttgaagggaaatgggtttgaaataacctgtgggaaaacatttagtggcggtctgaagctgacctatgccgaggcaaaggtgaagccgtgatagaggcaggaaggggtgcggatttgaagcagaaaaaatcggtagaggactaccttaaagtcatatttacgctttccaaaggaaaagccgtgcatggtgcggatattgcgggtgggcttggcgtgtcccgccccacggtttccgttgcgttgaaatcgctggcggaggaagggtatgtgtttgcggatgacacacacgaagtccatctgacggaaaaagggaagcggatcgccgaggacacttacgagcggcacagcacgttctgccggctccttacggggcttggggtggacgaaaagacagcggcggcggatgcctgcgagatggaacacgccgtcagccctgaaagctatgaagcgttaaagacgctggcaatggagacgctgcgtggagaatgaaagaaaggataaggaaaaatcatgtcaaggtcagcatcaaaatttcaggaaaagtttatggcgctcaaattccgcggcaaggagatcttcaagccgttaaacaccggcgtgattgacagccatgtgaaatgcatccgtgaatttatcgcaaatattttcttttatacaaaggacggaaccaccatcatgatcgatgcgggctataactatgaacgcctgcgggagaagatggagtggatcgggatcgatccgtcagaaatacagcatattttaatcacgcatcaggatacggaccatgtaggcgcggtggagcgggacagtgacggcctgttccgggatgccacgctttacatcggggaagtggagaaccgctaccttacgaaagaagtgcggcgcaaggtctacggcggatggtataagctgccctatgtggagattgataaccggagggcgctgttaaaggacgggcaggtgctggatattgaagggataaaagtggagtgcatcatggtacctggccacacatgggggcatatggtctatctgatagatgacgcctatctttttaccggggataccatctggttcgggccggatggcggccgcagtttcctgaatgcgctggcggaggacaaccggctttccataaagtcgcttgccatgctgaaggaactgctacggaaaaggaacctgtatccgatggtcatcaccgggcatacagggtggtctgacgatatggattttgtgtttgcgcatacggacctcgtgtgcaatgcatccaaaaggcagaagccccacgatccaaaagcgccctacgacggctatgatgagtcggatgacacaagggagaaagcagggacagtccggctggagaaggcgctgcctgtaaaacgctgacggtggaggtaaaggaattatgatgatcaataaaaggctgatcggaacagtcagcgaaagcaaaaagtacataacggggaacgtggcggcacagtggtgttcccttgcggcgaatattgccatgatgacggcggtgacaggcctgctggcttccctttatgataaaacggcagacaaaggcagcattttcgccactgcgtttattgcggtaatcgcgctttgtatccgttttatctgcacaacgctttcaagccgtatggggtatctctcatcaaaatcggtcaagaaaacgctgcgtgaaaaaatatacaggaaactcctgctgcttggcgcttcctacaatgaacaggtgaaaacctcggaggtggtgcaggtggcggtggagggcgtggagcagcttgagacctatttcggggcgtatctcccgcagtttttctatgccatgcttgcgcctctgacgctgtttgtgtatctatgctttgtcaacgtgccgtccgctgttgtcctgctggtctgtgtgccgctgatcccggtgtctattgcggcggtgcagacatgggcgaaaaagctgctgtcaaaatattggggacagtacacggctttgggagataccttcctggaaaacctgcaggggcttacgacactgaaaatttaccagtctgacggctttaagaatgaggagatgaaccgcgaggcagaaaaattccgcaggataaccatgaaagtcctgaccatgcagcttaattctatcacaatcatggacttgattgcctacgggggagcggccttaggggtgatcatggcggcaacgcagtttcaggcgggaaaggtgaccctttcagggtgtcttttaatcattctgctttcggcggatttcttcatccccatgcggcagcttggcagcttctttcatgttgcaatgaacggtatggcggcaagcgataagattttccatctgctggatattcctgaagcggaagggaaaacaggatattttccggtagactgtcctattgtctgtaccgggctgcgcttttcctataatgaaacttcctccgcaggaggaagggaaatcctgcacggaatcaacatggagtttccgaaggggggatttgtttccattgttggggaaagcggctgtggaaagtccacggtggcggcaatcctcatggggaggaaccgcggctatggcggctcggtgaaaataggaggcagggaacttaaggatatcggggagacggagctgatgagaaacatcacttatgtcagccaccaaagctatttgttcaagggcaccgtgagggagaatcttctgatggggaaaccggatgcttctgaccgtgagctttgggaggttcttaagcaggtgaacctggcgggattcctaaaatccgggggcgggcttgagatgccccttacggaaaaagcctcgaacctgtcgggcgggcagtgccagaggcttgcgctggcgagggcgctcttacatgacagtccggtgtatatttttgacgaagccacctccaatattgatgtggagagcgagaacgacattatgcgggaaatccatgcactggccggacagaaaacggtgatcctcatttcccaccgtcttgctaatgtgacggtttcagataacatctatgtgatggacaaagggaatgtggcggaaagcggcagccatgaagaactgctggccggagggggtgtttatgcaaagctgtgggatacgcagcagagccttgaaaactatgggaatacccaaggggtatacttggatggccattctgccggagcagaaggccgggacagaggaaaggacggtgcggttggatgaaaagaagaagtggattttcggttatggcaaggctgattggccttgtgaagccacttacaggatatatggttctggcggtggccatggggctggcaggccatttgtgtgcatcgttcatcacgatttttggcggttatgccgtgcttgggctgcttggcttagaggcacctttggggctgaaggctatatttgccagtgtggtcctgtttgcggtactcagggcagtcctgcgttatgcggagcagtcctgcaaccattttattgcgtttaagctgcttgcactgatccgggatcaggtgttcctcgcactgcggaaactctgcccggcaaagctggagggcagggacaaaggggacctgatttcagtcattacctcggatatcgagctgctggaggttttttatgcacacaccatttcccctgtggcaatcgcatttttctatactgccattatgtgcctgtttatcggttcctttcacccagcacttggaatcctggcgtttctggcatatctggcagtggggattatcatacccctcattacatcaaaattaagcggcagggacgggacagaattccgtaccggctccggggatttaagcgggttcgtgcttgacagcctgcgggggctttccgaaacaatccagtacggacagggcagggaacgtctcatgcagatgaacgaaaggacggatgccctttcggaaaccgaaaaacggatgaagcgtactgcagggaggaatatggcggtcacgaatacggcaattttgatatttgatttatgtatgctgtctgtgtctgcaatgctttatcaaagcggaaaagtggatttttccggggtactcgttccagtcattgccctgttttcctcttttggaccggctgtggcgcttgcaaacctgggaagcacgctgcagaatacctttgcggcgggaaaccgtgtgctggacattttagatgaagcgcccgcagtgcaggaagtggcaggctgggaaaaaacggcttttgaaaacgccgctgcaaaaaacgtcagtttttcttatggggctgaaagcatccttgagggcgtgtccctggagattcccaaggggcaggtcatcgggattgtcgggaaaagcggaagcggtaaatccacgctgttaaagctgttcatgcgtttctgggaggcgggaaacggaagtgtggagatttccggcagggatattgccgcaatcaacacagtggatctgagggatatggaaagcttcatgacgcaggaaacccatctgttccatgacagcataaagagcaacctgcggattgcgaagctggatgctgcggatgctgagatagaagaggcctgccggaaagcctccatccatgattttatcatggggctgccacagggatatgacacgcctgtgggggagcttggggatacgctttcgggcggcgagaggcaacggctggggctggcgagggcattcctgcatgatgcgcccttcctgctccttgatgagccgaccagcaaccttgacagcttaaatgaggcggtcatactgaaatccctgcgggaaggacgggatgggaaaacggcgctgctggtgtcccacaggcagtccacgatgcgggctgcggatgccgtatattcggtagaagacctttcacggacaggagggagggtaagctgatgcacaaggacgtcaatacaaaacgggaacgggaaaaggctgtggtgtcggagatgatcgcgctttactgcaggagacagcacgggaagaaaaacggcctttgcccggaatgtgcggcccttgccgaatatgcaaggcagaggagtgacaaatgcccgtttatggagactaagacattttgttctaattgtaaggtatactgttataagcctgaaatgcgggaaaaaatccgtgcggtcatgcgtttttcagggccgagaatgatattccatcatccggtgacggctgtgcgccatgtactggaagtgaaaaaagagaaaaagcggttggaggtttgtgatgaaacttaaaaaaatactgtatgtggttttagggtgcattggcgctactttgggtgcattgggggcggtccttccgcttctgcccgcattcccgtttctcctgcttgcggcgttttgctttgcaaggagttcagaaaaattacataactggtttaccgggacaaagctgtacaaaaacaatctggaaagctatataaagggcaggggcatgacacggaaaaccaagattaagattatggtgacggtgacgcttttgatgtcgatggggttcgtcatgatggaccaggttcctgtcggcaggattatccttgcctgcgtgtggatattccatatcctctattttatgctgggggttaaaaccttaaaagcaggggagattttcggaaagtcggaggtggaatgtgacggtgagtgaatatattttgtgctatttgaaggaggaagggaaaccatgccggaactgaaggaaaatacggtacagcagacattgtgtatgcccttgtgggggcgggcgatagcggcaaaaaaacatccgtcgctgtttcccgaccatgacgcgggcaggattgtaaaagaaatgggcgtggactggtcaaacaagaagctgtaccggttccagtatatgtggatgtgctgcctgatccgccagtataatatggcgtgggaggtcaggcattatctgaaaaaacatccccgcgccgcagtcgtggagatgggcgcggggcttagctgcctcagacggcagatggggaatgaaacgaatccgtggtactgcctggatatggaaaatgtgataacgctgcgtgaaaagcacatcccgcatgggaagctggaacggaacgtggtctgtgacctcaatgatttctcatggtttgaccggattgatttccgtccggaggatgggattgtttttacagcgggagggctgttttactattttgaaaaagaacaggtgcgccgccttctgtgtgccatggcgaagcgtttccccggcggcatggttacttttgacgcggtaaatgccgtggggcttaaaggcgtgaatgcggaagtgaaaatggcgggcaataagacgaagtccttcttttcattggaaaaaccgaaagaagaactggagggctggtcggagcatatcgtgaatgtgatggaacgggattacatagacggatacctgaaaggcggctggagaaaaagcattgttaccagggtttttgcctgggtgatgaagatgttccatatgagctttatggttcatgcggagttcaggggtatagcacaggatgccggatgaaacgcaaacaaaactttgtgcattttttataaataataggaaacggttttttgtggaaaatgccctttgattttgaaaggcaaaaagaatataataagatttggaaattaaataaggcaaaatcaacgacacatgtggcgcgccgcgcgtaaatctgattacggtacgggtgctgcaggtgtcgttttttttgcgcaaaaaaggagaatctattatggaaaacagtaattatcttggaacggaaaaagtagggaggctgctgcggcagtttgcaatcccctgcatctgttcgctcattatttcctgtctctataacattgtagaccagatttttgtgggcaacggtgtgggttacctgggtaatgccgctaccggcgttatcttcccgatcacggtagtgggatgggggttgagcctgttctttggcgatggtgcggccgcatccttaagtgtttctttggggcgcggggagacgaaggatatacacaggagcgttggtggtgcagtccttggctcgtttctttcaggtgtagtggtgattgctattgcctatctgtgtggggacggtctgctgcgcatgattggcgcaacggacgccaatattcagatggcgcacgattatggcgtaatcatttttgcgatgatgcctcttgccatgacacagaatacgcttgcctctatcatcagggcggacggcagcccccaatacgccatggtggccatgcttaccggcgctgttatcaatattatcggtgatccggttgccatctttgcacttgacatggggatcaagggtgcggcatgggctaccatccttgggcagtttgtcagcttcttgatctgcgcagcttatctgaggcatcctaagacattccgggtgggcatcggcagtttcaggccgagcatggcgcttctaaagccggtaatggccctggggacttccagtctcttgacccagctttccatcgtaatcatcacagtagtcaataatatactgctggtgaagtacgggatccgttccgtttacggtgcagatattcccctggcagcgtttgtggtcattatgaagctttttcaaattgtactcaatgttgctatcggaattgccgcaggcgcacagccgatcgtaggctataactatggtgcgaaaaactatggccgcgtgcgggaactgttaaggctgatgataaagtggacggtcattgttggtctggtctgcatggttttgtttgaagctgttcccggtgtgtttatacggatgttcgggtcggcagatgatcctgtctattttgagtttgccgtactctgcctgcggatttatctttcgctgatccttgtcacctgtgcacagaaggtctgcgctattttcctgcagtccataggcaaggcaaaagccgccgcaccgctgtctgtcctgcgtgatgtgctgctgattgttttttccctgctgatccccgctgccataggcgttaccggaattttctgggcggcaccaattgcggatgtgctggccattgcggccacggcagcagttatgatccaggtatggaaagaattaggccatggagggaaagtgaaagagtccgaagcagtgatacagccttcccgtcagggggcagtcatcacgattgccagggagcatggctccgccggaaaacggattgggcagatggctgcagaaaaactgggtatcccatgttattataaagagctggtggcattggcggcacaggaaagcggcctggcccaggaatttatttctggtatcaattctgatgaaaatgccgttatgagggagctgtacctcacagccgatccggtgaagcgtgctgtcgcagcgcaggaaaaggcgatccggcatattgcagacgcaggctcctgcgtcatcatagggcgttcggctgactatgtactgcggggttatcagaatgtggtgcgtatctttatctatgccccgaaaagctaccgtgagaaaaagatcatggagatgtatggggacagcccggaggctgcgaaaaaaagcattgcaaggtcggatgcagccaggagtgcctattataaaagtgtttccgggcaggagtgggggaacccacacggctatgaactgtgtattgacgcatcagtgggagaagaggctgcggcagatttgatatgcagctatatccggcagataggcgggcggtaagtaaaaaaggaatgcccgcatgggagagtatgctgccagcgtctggtttattaaggtatcagccatataaatgattttatgccggaatggggtgattgtatcggacgtgtaatggtgatagaatttgcggagcaggattcttccgcatttgacgaggttatggagattctaaaacgccatccgggttttgaacatctgcggctggcagatgagccgatggtttcgcttccgtggctggaaatttatcctgaccgcagaaaaatataccgtgaccggcgcgagatacgccttatggcaaaggaatatgatctcctcagctttctcgtggcaaacaaagggcgtgtccttacctatgaccagatataccagaaggtctggggctgggatgcctatggggatgaaagcaacgccataggctgtcacatccgcaacctgcgggaaaagctatatgaggcagagccggatgcgccgtttaccatccgctgcgtgcgggaggttgagtattgctttgagatcaattcagaatgaaccttatggcagcctgggaaaccaggctgctttttccgtcctgcggaggttcgcggcagcatatttaataaaacgacatgaaagaacagcgaatagtgacaagcctgcggctcataagatgccgtaagacggtttttttattttaccctcaagttttcccctctgccgtggcaatgaaatgggaggctttcttaaaagcagggtaaaatacataagcctccgcaggaggtggttctcatgacggaagaacagaaaaatgtggtcataaagcgccgcagcagcggctttggatatgcgagcatagcaaaagaaatcgggctgacaaaggatgctgtggtggcgttctgcaggcggaacggtctgaccgggaacatggcggggaaagcgccggaggagaccggcagccgctgtaaggagtgcggggcggcgctggtgcaggccgaggggatgaagacaagggtgttctgctctgcgcagtgccggaagaaatggtggaagggacatccggagatgctgaacaaaaaagcggtctacacccatacctgcgccgggtgcggcaggaagttcacggcctacggcaattccaaaaggaaatactgctcccatgcctgttatattaaccatcggtttggaggtggcggggcagatgactgaggagcagttccgggcggaaaagctgtactatatttcgctttccattgctaaatccatgctggaaaaaggcgtcatcgataaagaagtattagccataattgatacaaaactgctggaaaaataccgcccggtttcgggtacattactggctggaaaaccgttgacttaatgcggttttagagtgatgtatagtagcggaaggagtgattttatggcgaagataagcaggatagagccgaaaatcccggctctgaagaagcggcagaaggtcgcagcctacgcccgcgtgtccatggaaacggaccgcctcgcccattccctttccgcacaggtgagttactataacgggctgatacagtcaaaccctgagtgggaatatgccggggtgtatgcggattttgggatcagcgggaccgggacggcggcgcgcagcgagttcctccgcctcatcgcggactgcgaggcggggaaggtggacatcgtgctgaccaagagcatatcaaggtttgccaggaatacggtagacctgctctctacgatcaggcatttaaaggaaatcggagtggaggtgcggtttgaaaaggagcgcatccattccttttccggcgatggggagctgatgctctccatcctcgcctcgtttgcacaggaggagagccggagcatttcggaaaattcgaaatggggaatccggaaaagataccagtccggcgagatcggggtgaagaacaaacgggtattcggatacagctatgacggcgggaaatatgaaatcgtgccggaggaggcggaagccgtaaggctgatattcgagaggttcacatcgggcgtgccgcttggggagatcaaaagcgaactggaagaggcggggataaaatcatggaggggatataacctttcctacagccacctgaactatatcctgcgcaacgaaatttatatcggcgaccgcaggtaccagaaatgctttattgaagaccccatacggaaaaataaaattaagaatcaggggcagctcccgcagtattatgtggaaaacgaccatacggcgatcatcagccgcgaggtttttgacaaggcacaggatgagatcatcagaagggcggcgctggtaaatcctgcataccctttcacggggaagataaaatgcggcatctgcggatgccattatacgaggcgttcggccactgtgaaagggcgggaatatgtgagctggttctgcagggcgaagaaagagaagggagtcacctgccggagccacaattattccgaagaacagctccagaggatatgcgccggcctgatggggatggaggaatttgatgcagaggctttcggggaatccgtcagggggcttaccgtccttgcggacggcagccttgaggcggcattcctggacgggcagacaaaggtgtgggaggcgtcgccggagccggtgaagcccccaaaacctgacaagccggcaaggaaacgcccgaaaaacatttttgacgggaagattttctgcgagacctgcgggcggcgtttcggcagggcggtgagccagacggcggacggcggacacctttactggtactgccgcgcaaaaagcagccacggcgtgacctgcgacagcgtaaattacccggattcggagataaaggaaatcttctgcaaggttatggggcaggatgaatttaacgaaggcttttttgaggaaacgctggagcggatggtggtgcagagaacggggagcatagacttccatctgaagggcggaacagtcaggacgcataaagccctgaagctccgcggcagcaggcacgagaacacgtccacggaggaatttgctgggaagatacggtgcgcctcctgcggcaatctttaccacaaatactgctgttacgggaaatacacctactggcggtgcagcggcaagtcaagagtccggacggaatgcagcgggcgggatttccaggattcggacatccgcaaaatctcggcttacctgatgggcatggaggaatttgacggggctgaatttgaaaaacaggtacaggagcttgtggcgctggaggacgggagccttgagtgccatttttatggagggaaggtgaggaaatggcaaagaacgtgacaacgataccggccacgaggaaccgcttcacggcggaccccatcagcagccggaagaagcggagggtggcaggttacgcccgcgtttccaccgacatggaagaccagcagaccagctacgccgcacagtgcgattattatacgaattacatacagagccgggaggactgggagtttgtcaaactgtattcggatgaggggatcagcgcaacctccacacggcgccgcagcggctttaaccagatggtggaggacgccctcgccggccgcatcgacttaatcatcaccaaaagcgtgtcaaggttcgcaaggaacacggtcgacagcctttccaccatccggaagctgaaggagaacggctgcgaatgttattttgagaaagagaatatctggactttcgattccaagggcgagctgctcatcaccatcatgtcctcgctggcacaggaggagagccggagcatttcggaaaactgcacctggggcatgaggaagcggttcgcggacggcaaggtgagcgttccgttcggcaggttcctcggctacgaccggggagaggacggcaacctcgtcatcaacgaagggcaggcggaaacggtgcggaaaatctacgggctgttcctgcacgggcattcgccttataagatcgcaaagatactgacggaagagggcatccccactccgggcggcaagaaggtgtggggcaaggcggtggtggagtccatcctcaccaacgagaaatacaaaggcgacgcccttctccagaaggtctacacggtggatttcctctccaagaagaaaaaggtcaacgagggggaggtgccgcagtattatgtggaggggaaccatccggccatcatagagccgtatgtctttgacagcgtccaggcgctgatgaaggcgaggcggccggggaagaaccggaatagctgcgtaggcgttttctccggaaagataaaatgcggggactgcgggagctggtacggctccaaggtatggcattccaacgataagtaccggaaggtggtctggcagtgcaaccacaagtttgacggcggggagaaatgcaccacgccccatcttgacgaggaagccataaagacgctgttcgtcagggcgctgaacagtttctgcggggaaagggcggagatcacggcagcctttgaggagatgaaggaggcggcatttgggacggacgaactggacagggagaagaagcacctgcaggaggagatgaacgtggtggcggagctgatacagcagtgcattgccgagaacgcccgcatcgcgcagaaccaggcagaatacgaaaaacgttataatgcccttgcggaacggttcgacagggcaaaggcgcggctcggcgaggtggaggacgggatcgtggcaaagcaggcgcagcgggagatgatgcagaacctggtggatacgctggaagggatgccggatgccgtggacagcttcgatgagggcgcatggtacgcactggtggactatgcgacggtctacggcagggatgacgtccggtttacctttaagaacgggatggagataaaagcataaggtttagaggacagaaaaggcttctgacgcacttggagtgtgggcaggggcttttcttttttatgaagtattctgttttgcaaatggtataaaaatgcagggagaatcaaaacgggatttgggcattcagatgaaatttattttatcctcttgacaaaaactccggtctggactatactatataacggtgatatataacactgttacaaggaaaggagcgtgcggcagaatgagtgagccggaaaaaaacacactggagctgattcatgcggcggcaaaagcggaatttatggaaaagggtttccaggctgcctccctgcgaaatatcgtcaaaacggcaggcgtgaccaccggggcattttacggctattacgacagcaaggaagaactgttcgcggcattggtggacccggcctatgaatatatgatggggcggtataagcagacccatgaatattttgaaagcctgcccatggaaaagcagccagagcagatgggaaagatgtcatcagagtgtatgaatgagctgctggcatattcctgtgagcatatggatgaattttacctgatcctgaaatgttcggcgggtacgaaatacgcttccatgatcgatgacatggtggagatcgaggtggaggctacccatcattattataaagtcttagagcggcttgggactccttcccccaaaattgacgaaaggctggagcatatcatggcaacagggatgataggcgccttttttgaaatggttctccataggatgccttttgacgacgcaaaggcgtttttgcagcagttaaatgatttctacaccgcagggtggatgaaaatcatggggcagtaatccgagccgacagctaatatatagaaagtttgcattgcgggctttctattatattttcctcatgggttagcgaaaactaaccaatatttcataaggataacagggaatgactgcagcgtttcctttatcataaaaaacatacaaggaggtcttatctttgaaaaaagaatccaatttaaagcggctcctggagtatgccgggggctataagtacctgaccatagcgtcatggattttaagcgcactgagcgcactggtggcattgctcccgtttgtgtacatctggaaagtcatcaaagaagttttggatgtggccccaaactacggggaggtgcaggacctgtcccataacggttggatggcggtagtttttgcagtggcggcaatcctgatttatattgcggctctgatatgttcccacttggcggcgtttcgggtgcaggcaaatatgcggacaaaggcaatgcgccacatcgtgaccctgcccatgggctttatggacggcatcggcagcggcaaagtcaggaagactgtttatgaatccagcgcagcaacggaaacctatcttgcccaccagctccccgacaaggcaaatgcccttgcgacacccgtggggcttatcgtccttctgcttgtttttgactggcggctggggcttttaagcctcctgccggttgcggcggcgtttgtcatcatgagcgtcatgacgggaaagcgcatggcaaagaaaatggaagaatacaacaacgccctggggcagatgtccaatgaagcggtagagtatgtaaggggcatttcggtggtcaaaaccttcggccagtcggtgttctctttcaggcggttcaaggaagccatcgacaattatgagaaatgggtgatcgcctatacgaaagacctgcgtttccccatgatgtgctataccacgctggtaaatgggatttttgcggtactggtcgcggcggcgctggtgatgacatcgggcggggtaacaaatgggtttttactgaatttgatgtattacatcatcatcacgccaattattacgctgacgctgacaaagattatgtatgccagcgagaataagctgatcgtggcggacgccatgtcccgcattgacagcattctggaaatggagccgttgccggaaacaaatcatccgaaacatccgaaggacaattccgtggagctttccaaagtttccttccggtataaggatgctgagaggaatgcgctggaaaatatttctctcacaatcagaccgggtgaacacgttgcttttgtggggccgtcgggaggaggaaagaccacccttgccagcatcgtggcaaggttctgggatgtaagagaaggcagcgtgaaaatcggcggcgtcaatgtaaaggatatcctaaaagaagagctgatggatacggtttcctttgtctttcaggattccaaacttctgaagacatctattttggaaaacgtaaggatggcgaaaccggacgcttcccgcggggaaatcctgaaagccctccatgacgcacagtgcgatgatatccttgaaaaattgccgcaaggcgtggatacggtggtaggtgcaaaaggcgtgtatctgtcgggcggggagcagcagcgtatctccattgcgagggtaatgctgaaaaacgcgccggtcctgatactggatgaggcaaccgctttcgccgacccggacaacgaggcaaaagtgcaggcggcgttttctgtgcttgcaaagggaaagaccgtactgatgattgcacacaggctttccaccgttaccggcgcagacaggattgtggtaatcaaagacgggaagatagaagatacaggcacacacggtcagcttaaggataaggacggcctgtatgccgaaatgtggagacagtacaacaaagccgcaaaatggaaggtaggtgtttcgaatgcatgaaaagttaaagcacacgtttgccctttctgacaagggcgcaaaggatatggtgggggcgtttttcgcctgcatcctgcataacctttccctgatggttccggtggtgctgttatataacctcatcagcgacctgctgggcgggggcatcccggaggggaaaaatgctttttatatcgcagggcttgtcattgtccttggacttattatgctgacctattatatccagtacaatgccacctttttcgccacctatgtggagagcggcgtgcgcaggctttcccttgcggaaaaactgcggaagattcctctgtcctttttcgggaaaaaggatctgtccgatttgacaaccgtgcttatgacggactgcgcgacattagagggcggattatcccactgggtgccggaatttataggatcaatcatttccatccttttgattgcagtcggactctttgtttttgactggcgcatggcgcttgcctccctgtgggtgctgcctgtctccttcggaattatactggcatcggcgggtattatgcgggttcggcaggaaaaggtaacggaggtgtccattgcgtgttcagacggcatccaggaatgtctggaaacgctgcgcgacctgaaagcgaacaatgctgaagatggatacttgaaagggctggataaaaaaataaaggatgtggagaaatatacagtgataggcgagcttaccaatgcggtattccatacctgcgggcgcatggtgctgaagctcggtattgctacgactgtgttggcgggaggagtgctgttagcagatggaaagattaccctgctcacgttttttgcttttatgattctggtttcccgcgtatatgacccattgatcgccgcattggataatttaagcgcagtcattatgatcatgaatatccagtgtaggcggatggatgaaatcttaagccacccggaacaggaaggcgcagagaagctgacaaacagaggatatgacattgcctttgaccatgtgggattttcctataacagcggggaaacggtcttaaaagatgtgtcctttaccgcaaagcaggggcaggtcactgctctggtcgggccttccggcggcggaaagacgacggtttcccgccttgcttcaaggttctgggatatccagaaaggaaagattacggtaggcggcatggacatctcgaaaatagacccggaatcgctgatgtccctttattccatcgtgttccaggacgtgacgctctttaacaatacggtcatggagaatatccgcctggggcgaaaggatgcgaccgatgaagaggtatttgaggcggcgagacttgccaacgtggatgagtttgcggagaaactcccggacaagtggaatacacttattggtgagaacggctgcgggctgtcaggcggggaacgccagcgtatctcgatagccagggcattcttaaagaacgccccgatcatcctgctggacgaggcgacggcaagccttgacgtggaaaatgagacgttgattcaggaatcgctgtcaaggctgatcgagaataagacggtcatgatcattgcccaccgtatgcgtaccgttgcgggggcggatcagattgtcgtcctttcggaaggcacagtggtggagcagggcagttctgatacgcttttgaaaaaggatggcatctatgcccgcatggtgaagctccagacgcagagccagaattgggcgatggaataagaagggcgatattccgtttatgtttaggaaaggaaataagaggataccttctacataagtctgatggcagatgttgaaggtatttctctgttgtaatttaccgcatacttgacagaaatcttaaagcccagtatatttagcaagttagaagaaactaaccaatgcagggaggtgattttttggatagcgtaaaccaaaatttgaatactctatacatagagatgctttccaattcccctaaaactgtaacaataaatattcccgaagatatgggaaaaggcagaatatcacaggttgtcaccaaacagggagcggttttttcggattgggagatgaattattattctgacatgaatgtgcagggcattaacagccaagagtatatccagatgatgttctgtctgaatgaaggggtatcatggaatattgcgaatgaccggcagggtgtccatatttcaaagggggaatcctgcatatacagagggcatgggaaaatggaatacctgtgctacctggggaaaagggattttgtgtttaagaacgtgaagattcccgtagaatattttcttaggattctccgggattattttgaaccctgtgaaacagagatgtatgagaaaaagctgcttgacggcatatcgaaagtatcaattactccgtatatggaacatattttcgcagaactgaaagattttacgcagtattgcggaggattaggctatctttttcttgaaagcaagattctggaactgctttctgtgtatctgagtgaggtattggaattaaatatactggcgaccgggcaggtttatgtttcaagaagtgaaagggattccatcattgaggcaaagaggattattgacacccagcttgcgtatgcacctacctgctccgaactggccgggatggtgcatttaagcacgacaaagctgacaaagggattttctgctatgtttggcaattcgatccatgcgtacattatagagcagcggctggaaaaagcagcaggtctgctactggacagcgatttgaatataacggaagtatctgttgccgtggggtattctaagccgagcaattttgcggcggcttttaagaagaaatacggcatcataccgaaacagtacaaagaacagaaatcaattaaataaagaaaaatgttgtttttgggtagaatcaaactgcttttgggttggattagtcatgaataactggtagactgtttcttgggttagagattgctaacccaagaaatttttttataaaaacaggaggcttaggtcatgaacaagaaattgaatgcaaaggattttatcctgatcggtgttctgactgcgctcatgtggattatttgcatgattatcagcaccataatgagcgtggcaggtcccgtgacaaatgttttttaccctgcagtagctgcaattccatgtggagttgttatgatgcttctgcttgcaaaggttccgaagaaaggtgtattggctatcagtgcggcaatacagggaatcttgtttttgctggtcggcggcttctggacgattccaattgcactgattatcggcggtctgctttgtgattttgcgattatgggcagtggcgacatcagcatgaggtcaatggcagtggcgtacagcatctggaacggcattttttccatcggggcgatagtgatccccatgcgtttcctgcagagtgcctttgtcggggcaatggaaaaaaacaacattgcaccggaatacattcagggcatgattcatattacttccggttttatgccagtagtgattattatagcagggttaattggcggcctgcttggcgggtatattggccaaaaagcattgaaaaaacattttgtcaaggcggggcttgtttccgcaaaataacttacatagatgcaaatggaaaacaataaggtttgtcagtagactggctggttcaaatcagaaggcggggctgcaatcacgtagttccgcttattttttggaggaagaatggaaagtaaaataaaacaaaaaatcatggagcagccatttagaggaaccgcattgttagatccccgctgtaaaggactgctgctgattttacttggatttgtaagctattttgtgaacggggaggcagtcagcctgatattggtgctgggatttgcactgtttgtcagccttggaaacggggcaaaatgggctgcgaaaatggtggtaagctacgcagtggtatctattctgagtaccctgctcaaatatgtgcccattcctgtcctgagcgttatgatgagcgtgtttggggtgacgattttgaaattcatccccatcgtgatggttggaaattggattttacggacaacgcacatggatgaccttatggtggctcttcaaaggatgaggctgccacagtcggttacgattcccctggtcgttatgttccggtatatccctaccctgggaattgaataccgcatgatccgcaatacgatggatatccgcgggatcagcgatacactttggaaacggattacccgcccggttgccacagtagagtatattttaattcccctgcttatgcgctgcctgaaagtgacagacgagctggcggcttcgggaacgacaaggggactggaactggaagaaaagagatatgccctcagagatgtccgcttttcattgccggaatatctcgtgtgcattgcagggctgctctttttgggtacgctgttgtttcttgaccatacctccatcggagaaattgttttgtggagggtgtgaagatgattgcatttgaaaatttttctttccgatatgaggagagtgaagaatttactttaaaagatattaacgccacagtgcggacgggagaatttatcctgctgacggggcgcagcggatgcgggaaaacaacactgatacgctccctgaacggattaatcccacatttctatccgggggaaatgaaaggcgatatacggatggatggggattccctgttagacatgaaaccgtcacagttagccggaaaaatagggacagtgttccaagacccgcgttcacagttttttatgacggatacgacacgggagctggcgttcggctgtgaaaatatggggtatcaaagagaggaaacagtggagcgtatcgcaaaggctgtagcagatctggaactggctgattacttgaacaggagcatttttgctttgtcaagcggtgaaaagcagcaggtagcaatcggttctgtgtatgcgctgcagccaaaggtctatatattcgatgaaccatctgcaaatctggactatgaagcgacaaagaggctggcgcagattatggcaaagctgaaacaggatggttataccatctttgtagtggagcatcggttttattatctgcgtgacctgatagacagggttttcctgattcaggatggacagatcgggcaggagtttacaagggaagaattctgtttcctgccggaacggacgaggatatcctatggcctgcgcacagcatggccggagtgcgatgcagatgtttatcaggagaagaaaagccgtcatggaaacgggcattattttgcagttaaggagcttgcctttgcctataagaaaggaccggagatattgcagaatatcagctttgaagcccatgccggggatgtgattggcattttggggcataacggagccggaaaaacgacactgttatctgtccttacagggctgctgggagaaaagaacggtgaaatatgctatgacggaaagaaactctctccccgtaaacggcgttccctgtcctatcttgtcatgcaggataccgattatcagttatttggaagcagcgtggaagaggaactgtcccttggtgtcagcggtgatccgtctgaaaaagtgacagaaactttagaggcgctggaactgctggcataccgggaacagcatccggcagccctgtctggcgggcagaaacagagggttacgattggtgcagccatcgttaaggatagtcctgtcatttattttgatgagccgacaagcggattggattatgattcaatggtccgcgtcagcaggctgattgaacagctttcggaggcaggcattatcatatttgtggtttcccatgattttgagtttattgtcaggacttgtacggaggtcttacagcttgatgatgagggggttgtacacaacaggcatctgacttccggggttttgaagtcattatcagaaaagtattttaattaaggaggcttacacgatgttcaaaaaagtatttgagtatgcggggccgcacaagaaagacttatacagtgcaacatttattgtgctgcttagtgtccttatgggtgtcctgccctttgtgctggcttatcaggtgatttcaccgctcgttatgggtgaggctgtggggagcgggtatgtgtcttcacgggtaattgtcgtattggtttgtctggtactgcaggctgttctttatgggtggggattgaatgtttcccataaagccgcttataatacgctgcttcggctgcgcacctctttgcaaaaaagatttgagcagctcccgcttggtttcatccaggacaagggaacaggcacgattaagaagctgtttgtggatgatgtggacagtctggaagtgctgctggcacattccctgccagaagggattgccaaccttatggttccgctggctatttatgctgccatgttcttcattgactggaagctggctttattatcccttgcgtcaatacccgtcagttttgcagccatgatgatcatgtattctgtcggcatgaaaaaaatggggccatactatatggcgggacagaaaatgaacaataccatcattgaatacatcaatggcatggaagtggtgaaagtgtttaacaaagatgccgaatcttatgagcgttttcggaaagatatcgccgactaccgggattatacactggaatggtataaagcggcgtggccgtggatggcggtttacagcagtctgcttccctgcacggttatccttacgctgcctttgggcgcatggtttgtcctttccggattatccacgctgccggatttgattctcattctctgcctgtcgcttagtatcggtattccgctgttaaagtcattagggttcctgccgactatgccgcagcttaactataagatttccgctttggagcaggtgttggaaacagcgcccctaaatcagacagacgatgctttccatgggaagaaccttgatatttgttttgaccatatcacctttggatacgagaaaacccagccggggccggatggaaagccggtggcgacaatggatgaagtaatcacagatgtcagctttactgtaaaagcaggacagaaaacggcactggtcggtgaatcgggttctggaaaaagcacgctggcaaagctgctgattcactattatgacccgcagcagggaagcatttctattggcgggcagaaattaacggaaatgagcctggaggcattaaacagtcagatttcatatgtagcacaggaccagtatctgtttaatacctctctgctcgaaaatatacggatgggaaaaccggacgctacagatgaagaagtctttgaagcggcgaagaaagcgcaatgtctggaatttcttgaaaaactgccgcagggaatccgctccatggccggcgatgctggcaagatgctttccggtggccagcgccagcgcatatccttggcccgtgcaatcctgaaaaatgcccccatcattgtacttgatgaagcgaccgcatatgccgatccggagaacgaggaaaaaatggaggctgcaattgcagaactggtaaatgagaaaaccctgtttgtgattgcccataaacttcctgccatcatgaacgccgaccagatttgtgtcatagcacacggaaaactggccgcagccggcactcaccgggaactgctgcagacctgcggggaataccagaaattatggaaggcggcgcagggcagcgcagaatggaaagtaaataccgcaaaggaggggaagtaaatgtttgcattgctttcaagaatattaaatctctccggcaaatataagggccggattcagggagcgtttttatgtgcctttatagaatccatacttgcaaaaatgcctatatttttggcgtttcttgtactctcagggttctatcagaaaactttaacaggagaggattgcctgtatatcggacttgggcttgccgccgttgtagtagtgcaggcgattgtccactatctatgtgacaggctgcaaagtgctgcaggatatatgatttttacggataagagaatggaacttggagggcatctccgtaaactgccgatgggatattttacatccggcaatatcgggaaaatcagctctgtactcagcaccgatatggtgttcattgaagaagccgccatgagtacccttggcaatatgatgagctatatgctctctgcctttatcctgctggtatttatgttctttctggactggcggcttggcctgatcgccgcaatcgtgacgctgcttgcatcacttgttgcaaagggaatgaataaggtttctctgaaggaagccgccgggaggcagaatcaaagtgaacatttgacggatgcggttctctcctttgctgagggaattggcgtgattaagagctataacctgattggtgaaaaatcagaagaactgaccgaaaacttcagacgttccagagacacatcaaccgaatttgaacggaaaatgacaccatggacaagagggctgaatatcctgtatgcatttgggattgctgccatttttgcactctctgtctggcttgaacaaagcggcgtactttctttgccttatctgcttggcgtgctgctctttgtctttgacctgttcgggccattaaaagcattgtatggcgaggcgtcccggcttacggttatgaacgctgcgttagacagaatagaagaagtcctgaatgaaagtgaattgccggataaaggtacacaacatatatccaaagcaaatcctaattacccggaggtttgctttgaccatgtggcttttgcctatcaggataaagaagtgctgcataatattaatttctctatgaaaaaaaatacaatgactgcgcttgtgggaccgtccggcggcggtaaatctactatcgcaaacctgttagcccgtttatgggatgtgaagtctggtaaggtaatggttcgtggcacggatatccggaatgttccgctttctgaattgatgagtcagattagcatggttttccagcgcgtgtatctgttccaggacacgatttataacaacatcagcatgggaaaaccggacgctacggaacaagaggtttacgaggcagcgaagaaagcccggtgctatgattttattatggcacttccggaaggatttcagaccgtggttggcgagggtggagctaccctgtccggcggggaaaagcagcgtatttcgattgcccgctgtatactgaaggatgcgccgattgtaatattggatgaagcgaccgccagtgttgatacggacaatgagagttacattcaggaggctatcagtgagctggtaaaaggaaagacgttactggtgattgcacaccgcctgaatacgatccgggaagccaatcagattctggtgatctcggacggacgtatcagtgaacagggaacacatgacgaacttatggcaaaggctggaatttatcaggattttgtgaatatccgtgaaaagtcatctggctggagccttgcataaaggagggcagtatgaagattcatgcgtcgggcgaggattatctggaagcaatccttgttttacaaaagaaaataggtatggtgcgttccgtagacctcgcccggcacatgggcttcagcaagccaagcatcagccatgcggtaggtgtattgcggaatggaggtttccttacaatggataaagacggattcctgcacttgacggaagaagggcgggaaatcgccgagaaaatctatgaacgccatcaattttttacggagcagctcattgcggcaggagtaaatgaaacaaccgcagaacaggatgcctgcaggattgaacacgctatcagtgatgagagttttctaaaactgcaaaaatattttatgaagccaaagtaggggaggtggcagcattgtgcgtatagtggtatttgaagtgcaagatgacgattcggatatttttgataaaatcatggagatagtgaaatcccatccggatattgaatgcctgcaggtgaaagatgagccgatgctgtcgcttccagggctggagatttatcctgggcggagaaagatttaccgtgaccgcagggagatcaaccttaccacaaaggagtatgaccttttgtgcctgcttgcggcaaacagggggcaggtgctcacatacgaccagatataccggaaggtctggggagaagattcctatggggatgagagcaatgccatcggatgccatatccgccatctgcgggaaaagctgtacgaggcggagccggatgcgccgtttaccatccggtgcgtgagggaggtcgggtattgcttcgaggtcagttctgaataaaggcttatatggcggtttggttttccaagccgtcttattttgtgctttttcagcataaaaacagatttttagcaacgctttttattccgtgtacacccctcggaggcaaagttaaaaagtatggggcaaaattaaaaagtatagggcaaaattaaaaggtttggggcaaagttacattgtatcaaagacggctattagatagatgaaggtatcactggaacatctgtccataagagacagagttttcttgaaatgatggaagatgcgaaaaatggtgcattcgatttaattgtcacaagagaagtttctcgttttgctagaaacactgtcgatacattacaacaaacacgtacattaaaaaaatatggtgttgaagtatattttacggaagataatatttggaccatgaatgatgatgatggtgaacttcgactgacaattatggcaacacttgcacagaatgaaagtaaaaaaacatcagttcgtgtgaaagcaggacagaagatttcattccaaaacggtgttatatacggaaatggaaatatattaggttatgacaaagttggaagagattttgtcattaacgaggaacaagctcaaacagtacgtatgatatataatatgtatctaaacggtatggggatgagaaaaatccaatttgaacttgaagcagctggaagaaaaacatcaacaggattaacacgttggtattcttcttatatcagcagagtattaaataatccattttattgtggaatgattgtatataggaaagaatatgttccagattatttagagcagaagaaagtgagaaattggggagaggttgaacagattgcggtaattggttcacataaacctattgttacaagagaagaatttgaacaagtaaaaacaatacttaattcaaaatcattttctgttaataatcgaggacgaaaaggtaagcataaggcagatgatgtttattgtagaaaattgaaatgctattgtggggcatcaatgaatagacgggtatggcgcagagtaaatggtattccacagtattgttatcaatgctattcacaagtaaaaaccggaagcatttctacaagaaaaaaaagaggtcttgatatagaaggtatttgtgattcaccaatggttccaagatggaaacttgaatctatggcagatatgatttttcagaaattttggaaagatagaagtggaattataaagattgcaaatgaaatgctggaagatcattacaaagatgatcgagaaatagacttccaaaaagaaatagaagaaacaaaatataagcttgaaattctggataagaaatttgataatctgattgatatgagaattgcaggagaaattgatgcagcaaagttcgatgaaaagaaaaaggcattgactgatgaaaaagaaaagtatgagaagatacttgattcatatcaaatagatgaagaaatttcagatgaagaatacaatcaacgattacaagtgttaaagtatggattggaaaaggattttaatttttcaacacatagcataccggatgaggtgatagaagcatttgtaaaagaaataatcgtatatccagattgttttgtatggaaattgaatatagtggacagagacttgaaattaaaaatcgcaggtcggaaaaagaatccagacgttagcctaatcgagagtcctgcaattggcaattgtatcacaggcagcaattgccaagaagaacgcttaattatagttgttagtagattatacatagaagcttctttggaagtacactgacaagtgaattataaaaaatagaatctcccctcatatctgatggaatcaattagatttcattcggtgtgaggggagattttttgactttatattgggaaagtgttatttaggggagaatttggaagcggttcaatgacttgattagcagaaattctattttggtcaacgaaagcgggagaaacgttccccaagaactgtaaaaatacaaaggtggtcaaaataatcatgttacgcataagattaattccaaataaagattatgcagtaaatcagcgagtatgatagaaaaaaacagtgaaaattcataaaaaataagaaaatataaaaaattaacgcagaaagttttatttgttatatttgaaataaataaaccggttcatttattaggaaggaggcatttatgacaagaaagataaatgttattagtgcgttttttaagaattctttacggttaaaactgtgcaaattgcactaaaaaaggaaatgaaaattgtataacacgacaaaataaacaaaaagtgattgacaaaacaaatatataaatatattattaacttaacagttgttatttaacaaaaaaatgaaccggttcacttttggaaaacagaaacaatttaataacaggaggatgtatatgaaagcaaaaaaagtattagctatgacgttagctacagcaatgacagttggtatgcttgcaggatgtggatctacaggagagaagaaagaaagtggttcagatagtgagcagatcacattaaattattggacatggttcccaagtaaagatcagattcaagaaacagttgatgcgtttgaaaaagagaatccgaatattaagataaatatgacagtaatggaaagcaaagctttccaggagaaagtcccgcttgcattaagtacagaggaagatattgatgttattggagttcagccatcagcatttgcagaagaagttcaggattatctagcaaatctggatgaattaatgccagatgttgttggtgcagattggaaagatgcttattcagaaaaatgtcttgagcagggaaatcagctgacaagtggagatacaaagatgcttgtgcttacaaattctggttcgatggtaggattttataatgcagctctgttaaaggatatcggagcagaagttccaaagacatttgcagagtacaaagcagtggcagaagcatttaaagctaaatatcctgacaaatatgtaagtgtatttgccggaaaagactcttgggttgtagacgagatgatgctgacagttcttggccagcagggagattattataataagtggagatatgaaggtgctcctgttgacagtgaagaatataaacaggcaatcaacggattaaagaaatattttgatgaaggaatcttctcagcagatgttcttgacctggattatgcaagtgcaacagaggaatttacaaatggtgatgctcttgtttactatatgggttcttgggaagcaccattattatctaagacattaagagaagcaaatggaatcgaacttgaaaatgttggagcaatggctcttccgacagcagaggacaatggacagcttacagtacgttcctatatcgattccggaatcggtgtagttgattattcagagaagaaagaagctgcagctaagtttgttgcttaccttacattaggagatggagctgacatctttggaaaacagcttacaggaacttccgctaaaaaggattttacagtagatgcttctttatttgatacagatgaatccaaggctggatgggatacagttgttgatttgattaatacagctacagctgacagaaataacgtttcaggatattctgatatcgaaggtgctgcagtacagagtgtacttaacggatctgcaactacagagagtgcattgaaagatcttcagaaagaatggacaagtggaaaatattaatcagtaagacaattgaggatctgatgctaatataaaaaggggactttcagctgcatgactggtatgaaaaacaagtaaagcagttgatggtccctttttctacaggaattgaggatataaacatgacaagtaaaaaaacaaaattgaaggtgacgaaaagaaataacaaggcgggatttttatttcttcttccgttgattgttattttcataggattattaggatatagtttttattttctaattttaaatagttttagagatgtaacgataacatttcgcagatccgaatttgtcggcttagcgaattatcaaacaatattcaaagataaaagtttttggatatcacttttaaatacttttattttatcaacggctaacattttttgtggtttaacttttggatttattatatcaatcatactgaatttcaaaattaaaggaaaaagatttttccatgcattgttttttattccgtcaatgcttccgattgcattgatggcaacagtttttggatcaatgctcgagtataagaatggtattgtgaatcagattttaagaggagttggacttggtgcacttgcacagagatggcttgcagatccaaaattagcaatgggagctgtatgttccgtatctatctttatgataggtattccgattatgtattatactgctgatttaacaacaatcagcagaagcattttggaagcagctacaattgatggtgcaggtatgaaagaccagttattacttattattttccctgttttgaaaaatacacataaaacaattattctttctatgcttcttggtggatttagagaaatggaacgtgtttatttgatgacagatggaggtccaggcggaagcactgagattatcggaacctatatttatcgtgctacacgatcagcgggatcaaatatagggctcgtttgtgcagctgcgattattgtattaattgttgcatttattatttcatttattcagttaaagatgacatcaaagaatgggtaggtgttggatatgagaaagaaaaaagaaaaagactatgaactcgaacaagatttatttgcaatttcaaaagcgaacagaagagtaatgatcgtcttccttatcataatgttagctttgtggtgtgtgcctatttattctttgttaaaagattctttaaaggtacatggaatagagaactactggtatgttcttacaaatgaagtaaatggtgttccattttaccagtactttgtgaattccattatcaatgctgtatttgcatctgcattactggttctgatctgttcattttcaggatttgcattttctaaaattgaatttgcgggaagaaaagtgatttataatctggttttaatgtgtcttgcaatttcaggaccgattttgattataccgttcttctatatttataagactgcacatttgtataatacacatttagcaattattctttcggagtgtttgattacaattccgtttggagtactcatgatgaaaaacttcttcgatggacttccgactgagttgatggaatcagcaaatgttgatggtgcgtctatccagcgttgctttttcagtatttatttaccattggcaaaaccagcgatcattaaccttgctgtattgcagattatgtggtctttccaggatttccttttcccattgatgttccttacgaaagacaaggcatatacaacaacggttgcagtgaatgcatttaagggagcttatgggatgactccgcaaaatttgggacgatataatgcagctcttgtattgatatctattccaagtatcttgatatttactttcgcacagaaatttattgtaaatggaattacttcaggtgcggtaaaagaatagacatgaaaggtttaatgctatgaataaaacattaaaatatatttcaccggcaaaatcatttacagaagcactaccactaggaaatggatctcttggagcaatggtttatggaggcgttccggaggaaaaaatcactttaaattatgacacattttggtcaggaacaggacatagagaagaaaaagagattgattcaagtacacttgagcaggcaagaaaattaatctttgaagaaaaattttgggaagcagaagagtatatgaagaagaatatgctcggattttataatgaatcttatatgcctttaggaattctcagttatgtgtttgaaaaggtcgatgaaccaaaagaatatgtgcgattccttgacctagaaaatgctatatttacttcaaaattcaaaaatcatgaaacagaatatatctctaagatgtttatatcaaatccggcaaaagcacttgtaattaagattacagccaacggaatggacaaattggatttgaaagtgaagcttgatagcgaagtgcagcatacaatcaagacagaaaaggattgctgtttgtatgtaagcggaaatgcaccgtctaatgtacaacctaattatgttgcttgcgaaaatccgattgtatatgatgagaagaatccaggaatggcattttgttgttatttgcaggttactcataaaggtggaacggttagtgcagatttagacggtttgaaaattcaagaagctgaagaagtagtgttttacttgacagcagcggatggatataagaaatacaatcaaaggattgaaacgaatccagaagtgtgtgaaaagagctgcggtaatcagattcagaagttgaattcaaaatcatataaagaacttgaggaagaacatatagcagattatcaatctgtttataaaaatgtatcacttgaattagaagaaatagaaaatgatctaccaacagatgaacgtttgaaacgtgttcagaatggaaaacaggatttggggctgtcatgtctgtttttccattataatcgttatctgatgatagcatgttcacgaaaaggaacccaaccggcaaatttacaaggtatttggagcgaaagtataagacctgtatggagcagtaactggacaatcaatattaataccgaaatgaactattggcttaacgggccatgtaatctaattgaaagctttacagcatttgtagatttcgtcgaagaattaagtcatgccggagaagaaacagcaaagaaacagtgtcattgttcaggttggacagcaaatcataatgttgatatatggagacagactggtccagtagatggcgaacctaaatatgcgtactggccgatgggcggtgtatggttgtgctcacaaagttatgaatactatagatattcaagagatttggagtacttgaaaaataaaatatatccatcattgagaggatctgttttgttttgtcttgattggttacaacaaagggaagatggactttattatacagcaccttctacctcaccagaaaatacatttaaagatggggaaggacatgtttgtggcgtgagttacatgacaacaatggatttagcaattataaaagaattatttgctaactatttggaagcatgtaatgttcttggaatcaaagaggatttgatcgagcaagtgaatgagcgcagtaagttattaccaaattatcagattggaagaacaggaaagattcaggaatggattaaagatttcgaagaatttgatgttggacatcgacatttctctccggtatttggattccatccgggacactcaataaagaaaacagatactgaattagtaaaagcatgtcagaagttcattgaagaaaaggttgcaaactataaacagcaaataggatggagttgtgcatggctcattaacttgtgggcaagattaggtgatggaacgaaagctaattactactatgaagagttgttacggcaatcagtttataacaacctttttgaccttcatccgccattaggtgaaacggaaggagaacgggaagtattccagatcgacggtaattttggaagtgcaagtgctgttgctgaaatgcttttgagtagtgaagatggaaaaattactattcttccagcattaccagagagttgggaaagcggaaaagtaaaaggtcttctggctgtaggcggagttgaggtggatatcgcatggaaaaataaaaaaccaatttcgatttcactttgttcttctgtagatcagtttataaatattttttatggaaataagaagttagcggaaaaaatagaattaaaaaaacaggagcagcaaatcatagatctgcactcctgtgaatggatttaatcatgttaattgacggatgctttccttataatgcatggttggtttgtgcattatcgtttttggataatcagagtagtcaccacaaatacgtctgtaaagaagttttccagcctctgtgcccatgacattagtaggctgttcagcaaaagacagtggtggatttactacatttgcaagtggaaagttgtcaaatccaataaccgagatatcatctggtatttttaatcgtaaatagttaattgcaagataagcaccaatagtcatatcatagttactgatgaatatggctgttggtcttttttggagtttgcacaaacgcatcatagcttcataaccaccgtctatacagtaatctccgcattgaatataatcatctgtaattgttaaaccagcgtttgtcatcgcttttttatatccatttagacgtccattactagtataatgattcggacttccggtgataatagcaatatctttatgtcccaaatcaattaaacgttgagtagattcatatcccgccagttcattatcaagaacgatgcaatctgttgcatgatcttggatttcctggtcaagtagaatcaatggaatattacttttctgaatcatttcaatttgtttaccatcggaggcgtacggaatcagaacgattccatcaaccatacgatcaattagatactgagtttttcgcaattccatttctgcattgttgtggcattcgcacacaataacactatatcctaaaggtaataatgttgattcgattgatgaaatcatagaagtacaaaatgtggaatttaacattggtaataggatagcgacagaaaatgatttcgcattacgcagtccttttgcgatattgtttggatgaaaatcaagttctttgattgcttcttctatagctaaacgagtattttcttttacagttttgccattaatgtatttagaaactgtaccgacagaaagtccggcacgagcggcaacatctcgaattgttgaagccaatataatgcctcccttcataaatatgataattatataaaaattttagcataattaataaaagaaatcaaatgttataaaaaatgctttctgaattttaaacctatcgaattcaataggtttaaagtagaattaatgatataagcaaaagtaaatgtcccaataatcagtagattaatgaatgatttgctgatgtttcttttatatgaatgagttaatctatgagataatataagaaaactgcaaaaatattagagctcgcttgaaacaaaaaacaattatttttgaaaattaaggggatattttcgttttgaatccgtctaatctatgtaaataaaagctggctggcaaaaagggggtaccaaattgacgaaggaggcacttggagaattgattctttcatcagagcgacaattgtatgcaacagcaaaaacaattttgtcagatgaccaggattgtgctgatgcaatacaagaatcgattgtgaaagcattttctaaaatagatacattaaaaaaagatcgctatgcaaagacctggttgatgcggatattaatcaatgaatgctataacattgcaaggcgcatcaacgtcaatgaacctttggatgaaggatatgcagaaaatatgaagcaaaaactatatggttgtatttaatgccattgcctatcctcacttaaatccaactatgcctattggtggaggattctctcttcgtcctggtacagatatgacagtgtatcttacctatgcaattatagcaggaaatgcaccagatatagaagaacttcgcaaagatcctccacaactgcaaattgcagaatatccaatccgaaaaatgcttgatataaaatgatgcaactgaaactatattcagataactttctatattgttttaggagaaaccattatttatgattgcataaataatcaagataaccgaggatcaacgaaactaattgtgccgttgatatcgtcttctaaaagattgaacgtaagtaggtaatacaatggctttaacaggatatcctggcgagcatacatatgaattatgggaaggtgttggacaaatacagtctacgatcggagcttttttttaatatacggctgattcatctggtggagtaggtggtaagtaaagcctttttcatttaattcttttagaagtcacttagctcaaactgctttaaatacttattgattagtttcagtttttcttctctttttatttttttatattcaatagctaattttaaattccataacacgctttcatcttttattacaaaaattatagaagtgagtgtatgtttaaagaatacaacggaggaagaaaaagaagtgccaatcacttatctgtcgttagagacaacaggcgttgggacagcaatctcacaggaacttctaatgggaaattcagaacattacggttctatggtagaaaaattagaaccaggagaagagaaagtagttacgtatccgtatgaaatatgttccatatggtttcataaaaaagactgggaaaatgtagagaagaggagtttctggctgacattttcttcgtatcctgataaaattgtgttatatttataaatgaggaacaagtcaaagaatgccggaactgttccccgaaaacagcaaaaatgcacagcaagtcaatggagtgaggtgaaacttaatgaagaaaaaaataatatatgtcttatgcattttaggggtgcttttggcattattaggactaaaaaaaagaaatgacacaatgtattcttcgggggtataccatcttaacagaagtgggatagtagaatctatagataagaatattatagttgttcgtttggataaattgaatgaacaagatgaggattttaaaaatgtcgatacactgcagttagattgtagaaattgtggttatgaattagaaaatctaaaggaaggtaaaaaaattatattttactatttcccatataatgcagacgttcgaccacttaaagtcgagaatatctatgtgataaatgaaaaagagtctaatattgatttgatgaagaaagccggacaattattggatccctatcgagataaaacagatgagtctatttacgcaagaggtaaatccggtggtgttattactacaaaggatattgaacaagctactgaattttacattttagcagggtatgaacagtcagacgctgaagataaggcagtagaatatatgttacaacgcgatgcaacttatcaaagagctattgcagtgggatattctgtgtctgatgatgaaatcaatgattatttagatgatttaaaagttacaataaatgattcgattaatagtgaggaggctcaggctcttataagtcaatttggttcggaagaagaatattggcagcatgaatttgaagtttataagataaatttaccaattgaaaaatatttagaatcattaaaacaagaatatttgaagaatagtatttctacacgatcaaataatcaagaagcagaagaaacaatagaaaattataatcgttatattgaagaagttcaatcagagttggttaaacaagagcaatatgaaatatttgaatgatcaataaatgtcaccaatataaaaagcgtgtaaaaagcgtgaaggaagggatttttttgttaaaaaagaataatgaactgaggaaaggtggatatctaaaaagttttcataaggatattatgaaagttgttttttttgtatgtattttatttctattattttttattatacatacaaaacttcaaaaatctatagaattacaagttcttgaagttcacgatacctatctgatccttcaagatttaaagtattctaatgactatagggtacatttggttggaaaagaatctacggattttaatgtcggggacttggttatagtgacatacaatggcgctgtagaggatacatcacctgcttctttaggtggtgtcacggaaattaaacctttaaaaaaataaaaggagactgtcatgaaaaaatatgcagaatagaaaggattctttgattttaaagcagaaagggaattatattccattgttaaagcatggtgagagtgttcaagtcaacgaagagaggggatattgttgtccgagaattgcaaaatcgcgaagcaagtcaaagaatatcgctggaacagttccccaagaaaaactacaaaaacaggaaatctatacagaaaaaagaaccgataattgcaagagcctatcaaaacaggggcttttaatctgcggattaatccgtagaatcaatattccttgacatttcaacaaaatagtttatacttaaaatagtttgaaattcaaaataaaatacaggagaattgaaaatgagtataaacaaacaattaaaaataggtgatctgactgcgaagctcccgattatccagggcggtatgggcgtaggagtcagcagaagctctctcgcgggagcagtggcgaaagaaggtggagttggaattatttcgacagcgcagattggttatgatgaagaagggtttgagaaggatcaggctgcatgtaacaacagagcaatccacaagcacatcaagcgagcaaaggaactcgcgcagggaaatggtcttgtcggtgtaaatattatggttgcactgaagcattatgcggagcatgtgaaagaggccgtggcagcaggtgcagatgtgatcatcagtggtgccggacttccgatgaacctgccggagctggtcagcgagacttgcagaacgaagatcgcgccaatcgtttcttctaaaagagctgcgcagctgatcttgaaaatgtgggcgcataagtatgacagaacagcagatttccttgttgttgagggaccgaaagccggagggcatctcggtttttcaagagagcagttaaatgagattgacacaatggattatgatgaggagatccgacagatcattgcctgcaaggaagagtatgaaaagcgctatgggaagaaaattccggtgatcgttgctgggggaatcttcgacagagcagatattgatcacgcattagaacttggagcagacggagtccagattgcgagcaggttcgtggcaacagaagaatgtgatgcgtcagaggcgtataagcaggcctatatcaatgcaaaagaagaggatgtccagattatccaaagtccggttggaatgccggggcgtgctcttcgcaatgcattgatcgagcgtgtcgagaaagaaaaagagcctattaagaaatgttataattgcttagcaaaatgtaatccgggaaaagttccgtactgtatcacgaaggcgttgattgatgcggtcaaaggtgacgtggaaaatggacttgtgttctgcggaagtaatgtcggacggatcaatcagatgatgagtgtacatgagctgatgcaggaacttgtgtcttagataaatgggaagaatccaaagtcatattgaggaaaattaaaaaaagagagaatagtgtgaaacaaatttaaaatatcacattattctctctttttatgatatacttagatgatatcagatatgaaataatgagatgatttattaaaaatagaagtaacttacaaggagtagcaaggatgaagatgcagaataacgatacaaaagatgaaggactgaaaggaaacgagaagattgaggaagcaatttttgcactccagcaggaaccatctcaggaacttttagcacatgcgttgacaatgatccgtagacgaatgaaagaagaaggacaattgattcttgcggtagagccttctgttgcagaacaactgaagatacaggcagtgaagacagctgatggaaagaagtggtggagtgcatttacaagttttgaggaagaattaaaaggttctaatagtgtgatgtctacatttttgacagcaatcgaaccattattccagtctgctgtacaggagaatgagattgaaggtatcattctgaatccctgggatcggacaatcatgcttgataagacactgcttcgactgattcttggagaaagtggaaagtgagaacaaagcgaaaaatgacagcagttataatatgtattttatttacagtgttatttgcctgttatggattctggatgagcgaaaatggatctgggacgggattcttcctgatctggtttgtattggctgcattgcttggaggatgcgcagcgattacatttctggatggatgggcaagacttccgatgtggatgttgtggatattaaggggaatactgcttgtatttgtagtttcctttgtgattatcgaaggatgcattattagtcagatgcatgcgaaggcagatgaaaatctagactacatcatagtgcttggtgcacaggtgagagcagatggaccgagtaaggtgctgaagcatcgactgaacacagcgatcgattatttggagaagaatccggagacaatctgtattgtgtcaggtggacaggggtataacgagccatgtacggaagcgcaggcgatggctgattatatggaagcggtcggaatcgagaaagaccgtttgattctggaagacgaatcgaaaacaacagagcagaatataaaatatagtaaaaaatatatgaaagacggagcaagtgtgggaattatcacaaatgatttccatatgtttcgggcaatgcagattacaaaaggtgagggattaaagtcagcgaaagcaattgctgcgggctcgaatccattgtatctgccaaacaatatgcttagagaatatctggcagaatggaagtatctgatcaggtcaatcttataaaaagcaagaaaagagagatgaaagaaacaaatgggtagacgagaattagaagaacgaatcgagaaaagaagagaggactttgtaagaaacagtcttctttcagatgaatttattgactttgtacaggagaatttaaagccggtcaatacgatgatggcttattatcagtgtgcgatcatggaagttgagacgaaatttaaggtgctgagcgaacagtattcgctggagtatgaccgcaacccgattgagagtattaagacgcgtgtaaaatctatggaaagtctgctgaagaagattcgtcgtaaaaatattccattgacgattgatgcaatcgaagaaaatattcaggatattgccggtgtgcgtgtgatctgcgcttttcaggatgacatttataaacttgcgaaatgcttccttgatcaggacgatgtaattttaattcaaaaaaaagactatattgcaaatccaaagccaagtggttacagaagtcttcatctgatcgtgaagactccgattttcttaaaagaaggaaaaaagatgatcacagttgaagtgcagcttcgtacgatcgcgatggatttctgggcgagcctggagcataagcttcgctataaaaagagtattccggaagatcagagtaagtatctggcagaagagatgatggactgtgcacagatcagctcagctcttgatgagagaatgcagaaggtgcgtgatgtgatcatgcaggcggaggaaaaagaggaagaaaaaagtagcggcgtggaaccgttaatgcttcgaggattgacagagcggataagacagaagaatctctgatgtagacaggcggaagatgtttgagacgaacagaaagctgtcgagagatatgcagagatttgtagggataaacagagagccggagggaaaagattatgatcaatcgagaagatatgctggcactgaccagacgaatgacagtaaaacggacatcgatcacccggatcgccgggggatatatggatatagacggatttattgacggaacatttaacaccagttttctgaaattaaatcctgtagaacaggagaagaatctggcacttgcgaagaaagtgccgtttgcgaaaacaaataaaaatctgaaggaatataagttttctgatgatcaaagaaatccggacagtatgtggaagcttctgatggggatgcgtgcctgtggcttgaaaaatgatgctctgatggagacattttatgagattatcggggaacattatcaggcagatgaagattatgcaatctatgtttttcatgacagatacgatattccggcgaaggggctggatcatatacgtcagggagaatcagaacgaatgtatgaatacattttatgcgtgatctgtccactaagcggagaatatgaaccgggcgaaccggaatgcggtttcctgtttcctgcattcgtagatggaggcgctgcaatgaattacgtggatatttaccaggaagacgaagaatacccgcatgaagaactgcttgaactgcttggagtggaaaggaaaaagttatggcagaaacatacaagtcaggagaaaaagtaaaataccggttggcagaggcaatgaaagaatgcatgaaaaaagctccggttgagaagatcacagtgaaagagatcacagaagaatgcggagtgacgcgtcagaccttttaccggaattttcaggataaatacgatttgatcaactggtattttgacaagatactgattgaatcctttgaacatatgggagagggacaaacagtctatgaaagtcttgtaaataaattccaatacattcagaaagaaacacttttctttcgtgcggcatttaaaaatgacgaccagaactgtttgcgtgatcacgactttgaactgatcacacaattttataccgatcgtatcgaaggaaacaccgggaaaaagatgtccgacaagattcgctttcagttagaaatgtactgccaaggctccatttacatgacggtccaatgggttctcggcaatcacaaagccacccccgaaaccctggctagattcctctccgaatccatgcccgcagaactaagagacgtctttaaagaacgtggattgttgtaaatctatttctgtccacagaaaaattcgttctatgattcgatagagtacaatcgaagtagaaagggacagtgtagttggtgaatgtggagcatacttgctcatacttgaaaaacgatagattgtgttaaagaaaggatcgatagctgtctgagcggcagcgagtttatcgatcctttctttgttcttagcaatctgttgtttttcttagtatgaacagtgtgcgtaaccctgagccaactgcactgtccctttctacgaagacgaaactctaacccaaatcacaggaagaattttcgtccgtgtaccagaaatcaatttacataagttttctaaagagtgccttcagatcctctacacttgcatctttcgggttacccggtgcacaagcatcagcgtgagcagactcagcgaggaactgcaggtcttcttctttcagagcttccagttttgtcgggattccaacgtcaacagaaagtttctgaacagcatcaacagcagcttttctgtattcttcaacagacatgtcgtcaacacctttaacgcccagtgctcttgcgatttcacggtatttctcacctgtacaatctgcattgtattccataacgattggaagcatcatagcacatgcaacaccgtgtggagtatcgtatacagcaccaagggtatgagccatagaatgagcgattccaagacctacattagagaatcccattcctgcgatatactgtccaagagccattccttcacggccttctttttcatttgcaacagcacttcttaaagattttccaatgatttcgattgctttgatatggaacatatctgtcatttcccaagcagcttttgttgtatatccttcaattgcatgtgtcagggcatccatacctgtggaagctgtaagtccctttggcatagaggacatcatatccgggtcaacaactgcgataaccggcatgtcatgtgggtcaacacaaacgaattttctctttctttcaacatctgtgataacgtagttgattgtaacctcagcagctgttccggctgttgttggaactgcgatgatcggaacacaaggttttgttgtcggtgcaacaccttcaaggcttcttacatcttcaaattccgggtttgcgatgatgataccgattgctttggaagtatccatagaagaaccaccaccgattgcaacgatgtaatctgcatcagctttcttgaatgcttctactccgtgctgtacattttcgattgttgggtttgctttgatatcagaataaatttcgtaagcaagtccattttcatcaagaatatctgttactttctttgtaactccgaatttgatcagatcagggtcagaacatacaaaagctttcttaaatgctcttgcttttgcttctgtagcgatctctttgattgcgcctgctccatgataagatgtttcatttaacataattctgtttgccatgattttcgatctccttttttaaaaacagattttcgggaaattcattcccgttactttatgtttttattttaacaatcggaaatagaaaagaaaagttacaaatagttaaaaatgtaacatttcaggcattttctttgtgaaaaagtattggaatttataaagaacctattaaattattgtgaaacaagtacagaaaatgggctagaatactagacgaaataatgagaaagttgtagaatctaaatatcatatatgtgatgactctcatctccacaggtgatgcgagacagaacaattacggaaggagacaggcattatggaaaaattaacagacaacttaaagaaggtaatactggctggaatcggagcggttgctacaactgcagagaagtcaaaggacgttcttgatgatatggtaaaaaaaggcgagcttacagtggagcagggcaaggttctgaatgaggaactcaagcataatctgaagcagacagtaaagaacaatgtgaatgtgaaagtcaaagtcactacaccggaagagttgagcgaacttctcgacaagatgacaccggagcagttagaagcactgaaggctcagatcaaggcgaaagagtcaaccgtagattcggaagcagaagaggtagatgcagaagatacagcggaagatgttgaaaatgtagatgatgcagaagttgttgaggaagagacaaaagaagagtaaaaatattagagaagctgccgaaaagcggcttctctgctttctcaagaaagaaaaaagtgactattacttttgaactatcagcaagggatactgaagaaaagaggaactcgtcaccgagacagcaggagaatacagatatgagtgagaaagaaaagggaacaaataattcaagatttagagagattatttctgtacttcgaaaacataatattacacgtggacttagtccgaagaaacttcgtttgatcatggaggatcttggtccgacttttgtgaagatcggacagatcatggcactccattctgacattcttccaaaggcctattgtgatgaattgatggaattatgtacggatgcaagaccgatgcccttcgaggaggcagtgtctgtaatcgacgagtcttacggacgctcctggaagaaagttttttcatcaatcgaagagacgccaatcggttctgcatcaattgcgcaggtacatagagcagtcttaaagtcaggagaagaggttgtcgttaagattcagagaaaaggcatttatgagatgatggcgcgggacattgagtttatccgtaaagcaatcaagctgatgccgccgatcagtctgaaaggaatggctgattttgatcttgtgcttgacgaactctggtcagtgacaagagatgagatgaatttcctgaccgaagcatcgaatatcgaagaatttgccagaagaaataaagatgtcaattttgttcagacaccggttctgtatcagcagtatacgaccgttcatgtgctggtgatggaatatattgatggttgcggtattgatgagaaggataagctgctcgaagatggctatgacctgaaagaaattggaagcaaacttgtagataactatattaagcaagtaatggatgatgggttcttccacgctgatccgcattccggaaatgttaagatccgtgatggaaagattgtctggattgatatgggtatgatgggacgactgacagagcatgaccgtgagatgatcacgcttgcgatcgaaggcgttgcactgaatgatgttggtctgatcctaaaggcggttctcggattgggcgaattcaaagaacgaccggagcagagaaaactttacgaagatattgaaggattgcttttgaaatacggaagtaccgatatgggcaagattaatgtggcagaggtcatgacggatctgatggaagtcatgaaagaaaataagatcatgatgccacatggactgacgatgcttgccagaggacttacgcatatggaaggtgtactttccaatatcgcaccggatatcaatatggtggagattgccagagcaagacttgctgcggattttcttcacaattttaactttaagaaggaattgaagaacacaggaagaagccttttgaaatctgtgcggaagatgattgaccttccatccatgacaacggacttaatggatgaattcatgaaaggtcagtcaaaagtaaacctggatctgcgtgtgtcaaaagatcttgcatttcttttgagacgcttggtaagaaatattgttatgggtctgtgggtcatggcacttctgatcagttcaagtattatctgtacaacggatatgacaccgaagtttatgggaatcccggcgcttggagccttcggatatctgatggcagtggtgattatgatctatgtatttgtgaaacatattttctcgaggaagtaaaaaaagaatataaagcgaaggaaaagagagatgaaattttcgtctctcttttttatatattaggaaagtcctttcctaatatataaaaaacgctccgctcaggatgcgcactgcggcgtacaaggtaggtgttgcaagcggtctacgtttccacttcggtccttgctaaacaagcgccactggcgcttagcaacgccgcaggcgcaagaatgtgccgaggcacattctttgttcatgagaaaaatatataagtttaaaacagataaatgagaaaagttctcaaataataaaaatccaattgactggataatagacatcctgtatacttacggagttagttggactaacacgagttagaaaagcataaccaggagcgattacatgaaattaaaaaatataaaatgtttacttgcagtctgtctttgtgcatcggccctgttggtcggatgcggacagaagacagcagataaatccgaaatatcgtcagaaagtgcacagaaccagtcggatgatatacaagaagtatccagagatgtttttgcaatggatacctatatgacagtgactgcgtatggagaaaatgcagaagcagccgttgatgcagcacaggcagagattgagcgtctggacgcacttttatcgacaggagatgaagacagcgagatcgcaaaactgaacgcagatggaagtgcagagctttccgaagatgcaggttatctgacggaacgtgcattggaactctaccaggaaacagatggcgcgtttgatattgcgatttatccggtgatggaagcatggggattcccaacacagaacttccaggttccgtcacaggagacattggatcaacttcttccactcactgatgcgggaaacatttcttgtgacaaagaaacgagaaagatatctttcggcgtagaaggaatgaaaatcgatctcggaggaattgcaaaaggatatacctcatccagaattatggacatttacaaagacaatggaatcacaagtggattagtgaatcttggcggaaatgtgcaggcactcggaacaaagacggatggaacgaaatggaagattgcagtgcagagtcccgatgacactgaagattatctgggaattctgagtgttcaggacaaggctgttatcacttcagggggatacgaacggtattttgaacaggatggtgtgacgtatcatcacatcattgacccaaagaccggatacccggcagaaagcggacttgtatctgtaacaattgtaagtacggacggaacactggcagatggactttctacttcactttttattatgggagaagagaaagcggcagatttctggagagaacataaagatgagtttgatgcaatccttatgagtgacgatgggacgctatatgtaacagaagggctggaaaatgatttttcaacggagagaacagttgagatcattcgatagaaaagtgtaagacagagtagattttggaggaaaaatggatttaaaagaaacaggaaagaagctgaaaccatttgcaccggtactttcggtagcagttgtggcatcctgtgtagcaggctccctgagtggatatcagccaccggtttatgcagcgcaggagcaaacgaattctgtaaaagaagagactacaaagtcagaagagcaggagcaggcggtaaaaggttcttttgatctgacggatggtgtttataagggaactggaacaggttatgcaggagatattacagttgctgtgcagatcaaagacaggcagatcacagcaattgatattttgagttcatctgacgatgcagcatttttcaaacgtgcacaggcagtgatcgataagatcatcgaaggacagacattggaagtcgatactgtttcaggggcaacctatagttcccggggaatcatcagtgcggtgaagaatgcactgacaggagaaaaagacagcggaacaacaggacagtcacagtctggtggcggcgcggcagcaggaagttctacttctgtcgcaacagtggaagacccggcagcatataaggacggaacttattacggaacagggactggatttggcggaacactgaaagtaaaggttgagatcagtggcggaaagatcacagacatccagattatggagaatcaagatggaagcgaatacatttccaaagcctctgcactgatcaatgcgatcatcagtagtcagagcaccaatgtagataccgtgtctggagcaacgtacagttcggttggaatcatccaggcagtaagagatgcattaagtcaggcggcagtgagtggaaatggagcgacttcggatccatctgaaacgaatagctcgaacagttattccagtcaggatcagagtacatcaataaccggaacagttccatacaaagaaggaatctattatggaacagcggaaggatacagtggagatgtatcggtagctgtggtgatccaggagcatacgatcaaagcaattttagtcacagagacatcagatgatgaagcatttttcaaccgcgcaatggatgtagtgaaaaatgtgcttaaaaatcagaatacagatgtagatactgtatctggtgcaacttacagttcaaagggacttctcggagcaataaagaatgctttgaaacaggcggagaaagtaacgaatggagaatccattgaagagaaagcagatacaacggaactggaaaatgcagtcaagtcagcagaagcacttgtgatggaggagtatacgcagagtagctgggcggttctgagtctccgactgaatgatgcaaaagagctgttggaaatagctgcgaatgaaacagtggaacagcaggctgttgacaaagcggtggagaacctgaaccttgcagttgcgcagcttgagaaaaagaagtcagatcaagaggaagaagtgaagacaaaatacatcgatggaacttatgaggtgagtgtaccgtgtaaaccggatgaggatgaagattttacagagtatcagctttctatgaaggtgacaatacgaaatgacaaaattgtatccattactgacgtgtcaggagatggggatgcagcaaatgacagctatatcaagaaggcggcaaatggaacttcaagcaaaaaaggtgtcgtttcccagattattgccaaaggaatgccggaagaaattgatacggtatccagagcaacctgttcttcgaatgcgattattgacggatgcaaaaaggcactggaaatggctttaagaccagaagagacggaggcgcagtaggatgaaagagtttatcgtaagactgtttagtctgctggcaatcgtcggtgtccttttcggatataatgaagtgttggatgtccgtgcgaaggatgaggaaatcgcaaaactgaatgcacagttggagatacagtcatctggtgccggcagtgattctgagtcagggagtgattcaggagatggagcaggatacaaggatggaacctataccggagaagcggatggatttggcggaacggttgcggtagaagttactgtaaaagatggaaagattgaagcggtagaagtgacttccgccgagaaggaagacagtgcatatcttgcaatggcggaagatatcattccgaagatcatagaggcgcagagtgcagaagttgatacgatcagcggcgcaacgttcagttcgacaggaattaaaaatgcagcagaacaggcattggaacaggcggtagagtagtgtgaagaagttaaacatacataatttaaaagcaaaagaaattaaaaaattgcatacttggcttcgtgccttgattcagatcctttattttctgtttctgccatctgtgtatacaacagcatttgccggtgtaaaatatattttcacacagataggagtaggtgaggcaatcgggatgcccccttttgtgactgtgctggttgttctttgcgcgtatacgattcttttcggaagattcttctgtggattcgcatgtgcattcggaagtcttggagatggaattcatgcattttatatctggtgctttaagaagagaaagaaaaagccggtgctactttcagaaaagatcacagagaagttaagctatttgaaatatctggtgttgaccgtaatcgcagtactttgttttgcgggagtatacggaaaggcaaaagggacaagcccgtgggatgttttttctatgttgcatgcaggaaatcttcgcttgcagggatatttgccgggagtgatattactacttcttattattgtggggatgtgtctggaagaaagatttttctgtcggaatctgtgtccgatgggagcagtattctcattacttccggtgcttccgttctttgcattgcaccgcgacagagaaaattgtatcaagggctgtagtggatgcacgaagaaatgtccatccgggatcggactcccggaagacggatcactcaaagtcgagggagattgtttccaatgccagaaatgtattgatacctgtccaaagaagcatatccatacaggaatcaaaggtctgaagggaaatgaattctggtttacgattcttcgggcaattctgttacttgtaattatgatctgggcaggagtgtaatagatgaagaaaaaagatctgtttttaggaggcggaatcctctttgcggcatgtgtactgtttcttgtgatgaatctgatgcagtatgtacaggcaaaggaaagcggacaaaaagaaaatcaggaaaaacaggttgtgatcaaggtggctggagaagtttacggaagatatgctttggatgaagaccaggtgatcgaagtgcaggaaggggatttttacaaccgtgtccggatcaaggatggaaaagcgtatatggaagaggctgactgtccggatggatattgcgaagagcagggaaagatcaataaccggacacagacaattgtctgcctgcctcacaagctggttgtggaaatagaagaggttgagaattctgatgattctcaaaatgaaaaggaacatttaccggatacaatttctaaataaatcaattgttcgactgtaaaggagaatgtatgaatagaaataaaaaacttgcgaacatggcaatgcttgttgcgctggcaatgatttttagttatgtggaaagcctgatcccaattaattttggagtgccggggatgaagcttggagtggctaatctggtcactgtaacaggtctttattttctggaaattccggaagtactggcggtatctgtactgcgtgtactcttgacaggatttctttttggaaatggaatgtcgatcatttacagtctggcaggggcggttgtcagccttcttgccatggtacttgtaaagaagatggatggaatttccattgtaggagtcagtatcactggaggcgtctttcataacataggacagatttttgttgcgatggcagtggtggagaatctgaaactgatttattatctgccggttcttcttgtggcaggaacagtgacagggttcgtgattggaattgtcgcaggaaagattttaccggttgtgaagaaagaagctgtaaggacagtatagataataatactttttgattacaggttagtaaaagctaacttgataatatattccatgcgggagcaggaaagcagaactgcgacaggcaggatctgtatgtaactattttagttaaaaaggaggtttctatgaaaaacaaagaaatgaaagtaaaggcaatgtccatggcagtggcaatgtctatggtagtaggactttgcccgtcaacgatctttgcggcaacaggaagtcagactgcaaaggatggaacttatacaaagacggctcatgtaaccagaacagaagatgacagtgacgatgagtgggaagaatatgatgtagaagtaagcttgaaagtagaggatggaaaattctctgagatcacagtcacaccgaaagaaggatatgacgaagaaaatgcatcctactttaataaagcatattccaaatcaaaaggatttaaaacaaagcttgaaggacaggctgctacagaagatacaattaacagctgggatacagtttccggtgcaacacgtacttctgatgcaattaaaaaagctgcacttgaagcaatccagtcagctccggtagctggggagacagttaccattgacacagcaaagctggagtcagcaatcgcagcggctgagaaactgacagaatctgattatacagcagacagctggagtgcaatgcagacaaaattaactgtagcgaaggcggctctgaaagcaaaggaatcccagagtgcagtggacacagcggcagatgagttgaatgcagcagtgaaggcattgaaaaaggcagaagttgtgaaagaaacgtatgtgttgatgaatattccatattctgaattttatgcagctgatcaggtagcaggagcagacagtgtatcctccgctacaaaagcgaaaacaagatcaacacttgtagctggatcttatcatgtaaacagtgatggaacagatattacaggtattacatatccggttaagattagtgatgcatctgtactgaaaaactatacacagatcacagatgacagcaagctttctattacagtgaatatgaaaggaaaagagacaacaacagaatataatggaaaagatgcgttattcgagagcgcaagctattcttactatattttaagtgagactccttcctattataaggaagcaacagtaaatgcagatggttcactcagctttagtgaagtgaaaggtgcaactgcacagaagttgagtgatgcatcaattgatttcacaacagatacaaagtatggagattatgaattagatgtaaatggactcccagaaacagttaatacagtatatggagttgtgatcagcacaaaagaaggagacaactacggacttcgtcatcttgaaaatatctggaaaaagaaagaactggcatggagtacaggatttgtgacaacatctcatggaaacacactggactcaaaaaattatgaaaagatgatgggtcagacaatcaataaaatcacatattacacagataatggaatctatgagattgatgcagatcagtatgtgccggttaaattcaatggaactatcgcagcagagaatgcagatgttgaaagtggaaaagtaaatgtaactgtagaaggccttcctgacgattatcaggcagaatatacagttgaaggtcttgaggatgttcaggtaaaagacggagtacttacctataagacaaaaggcgctgagataggcaaatatactctgaaagtatctgataaatccggaaaatatgcagatcttacgacagattttgaattgacaacagaagctgtaccggttgtatttaacagtgaaagtgcagcacttgtagcggcggaaggatatgcagcagaggatgtaacttcttatgtaaagaatatcgaatctgtaacagttgacggaacagagtatgcggcaacaggaaaacgtgcagtgaagatcatcaaagaagatggaacaattgatacaactgtagctccgtttaagaatgcagaaaatggacaggaatttaagattacagtgaaagcaacaggctatgcaaaggattgtgaattcacttatactttatcacaggagagtgagtatacttacgcatatgtaggacttagctgggcagagtactgggctgctgaaaatgtgcaggcagcaggaaatacatcttcttcagatgcaaaggattcaaaaggagagtctgacaagggtgcattcgatactgtaacaagagctacagtaaatcatggacttcacagaggttctttccagtgcaacgcagtaatcaaggcggaaaatggaaaagagtatgcagtagagtactggacagatggaactactgcagttctgacagacggaagcaagattacatttaacagaggagagatcacagaagaatccggtgcaacaacaaagatgacagagtatgatgtactcggactgaaatatgtgccggtgaaagtaaaaacatctgatctggatgcactgaaagcaagctatcgtgtgatcgaaaacggaagtgaacttgcaggaggatattcagaaaagaatctggtaagctatacaggactggttgccaatgtaacagagaatacaaacggtctgaaaacagcaacaaagaatgaggatggatctttcagtttctctgcaagagtgaataatggatcagagtccggaatcaaagatcaggcactcaagacagcaccaacagcagaggaagcagggctgacagtaaaagaagcaagcggatcttatggagaattcttaagagttgatctgacaggaaattatggtgatcttggatcaaatctccagactgttacatggacttactatggagatgacagcacatatacaaatgcaaaagctacttatggaacaaaatttgcagcagataactggatgcacaaagcaatgggaatccagcttggactgacagattctcttcgttgtacacttccggaaggaacggatggaacaggatattggaccattacactgacagcatttggatataatgacgtgacatacaaattccaggcaacagaggagaacattgtaaaagaatctgaggataaaacaatcacaacaacagagcttgaggcagctattgcaaaagcagaagccctgaaagaagctgaatacacagcggaaagctgggcatctatgcagatggaacttcaggaagcaaaagatgaattgaaaaatccaaaaactcaggcaactgtagacgaggcagtaagccacctcaacgcagctgttgaagcacttgttaagatagaagagccggcagcagttgatacttcttcccttgagaaagtaatcagtgatgcggcagctctgaaagaagctgattacacagttgacagctggaaggcattgcagagtgcactgacagacgctaagagcgcattaaatgcaaaagaaagccaggaaaaagttgataaagcaacagatgcgttaaatgcagcaatcaaagcacttgtaaagaatggaaatcaggcgggaagtcagaatggaagtgcaactccgactgttacaaagaaggcaggaacaactacggatggatcagcttccaaaggaacaagtggatcaaaagccgcaaagacaggtgacccagcaaatgttcttggcttattaggacttgcattctcctcactcggagcaggagttggcggatttgcatggaagagaaaaagaaaataaggacaagaaaattgagaaaatttttcaataatttcgcgaaaaagattaaaatagtgcattgacactatcgctttaaagtgataaactcctagcaaatggaataacgctttaaaccgatgaagcggagatcaaagtaattatgcgcgcacagagagtccgggaagctgagagccggatcgagatgcaggttgccaaatggaccgctgagggcacagtcaaaggatttgagaatccgagtactctgtgacgtgaaggcatacgtcagttgccggagatatgttagtatcttacagagcgcatgggagtgtacccgtgaatcaaggtggcaccgcggaaaagatttagatttaccgtccttgacagaataggaatattctgtcagggactttttttctaccataaacatatatttcctatcgggataaaagaaaaattcattttgcagcataacttcaaggaggaatacacatggacaagacattagaacaaatcagatcctacgctgaacaaggcagatacaagcgagttccgatcagcaaagagctgtatgcagatgcatttacgccgattagtgtgatgcgaacgctgcgggcggcaagcaagcattgctatctgctggaaagtgcggaggacagacagcagtggggaagatattccttccttggatatgcaccaacgatggagatcacctgtaccgatgggcgtgtgatcatcagcgaagggcatgaagatgaggataagaccagacgggaagttttaaccgaccatccgggaaaggttctaagagaaattctcgaagcatataaaagtccggttgttcctggacttcctccatttaccggagggcttgtcggatatttttcttatgactatatcaaatatgcagaaccgacattaaagccagtcctggaagagaagaatgagactacaggaaagacagcagcaaaaacggcagtaagagatttccgggatgcggacttgatgttatttgaccgtgtcatcgtatttgacaattacagacagaagctgatcctgattacaggcgtgaagctggaaggtgatctggaagaaaattatacgaacgcgaagcaggaattagaagagatggaacgattgatccgaagcggggcgcaggcagatttccgaccacttgttttagaagaagagttccatccgggagtggataaagaagattattgcaagatggttgagaaagctaaggaatacatttatgaaggtgatattttccaggtcgttttatccaatccgctgacagcgaaggcaaaaggaagtctttttgatacctaccgggtgcttcgaacctcgaatccatctccgtatatgttctacttttcaagtgatgatattgaagtggcaggggcttcaccggagacgctggcgaagttagaaaacggacaggtgtgcacttttcctcttgccggtacaaggaagcgaggagtgaccgaagaggaagatcaggaattggagaaagagctacttacagacgagaaagagcttgcagagcacagcatgcttgtagatcttgggcgaaatgatgtcggcaagatcagccagccgagaacagttaaagttgataaatatatggaaatccagagatattcccatgtgatgcatatcggttccacagtaacaggcaagattcggaaagataaagatgcactggacgtagtagatgcgattctcccggcaggaacgctttccggagcaccgaagatccgcgcatgtgagattatcgcagaacttgaacaggagaaaagaggcatctacggaggggcagttggctatctcgattttgcaggaaatgtagatacatgcatttccatccgtcttgcttataagaaaaatggatacattcgtgtacagtcaggagccggaatcgtagcagacagtatcccggaaaatgaattccaggagtgtttaaataaggcaggggcagtacttcaggctgtggaaattgcgaaaggaggattggaatgatactattacttgataattatgacagctttacatataacctgtatcagtttatcgcaggagtagaatcaaaaagaggtgacatgcaaaaagatcagattgattcagaagtgaaagtaatacgaaatgatcaaatcacaccggaagagattctggaacttgcgcccgaggcgctggtaatctcaccggggccgggaaaaccttctgatgccggaatctgtatcgaagcaattcagaagctgaaagaaaaaatcccgatgctcggcgtttgtctcggacatcaggcgatggcggaagcatttggagcaaccgtaggtcacgccggacagctgatgcacgggaagacttcaaagctgaaagatgtaaagacagacagtgtcctgtttcagaatctgacatttccaatccaggtggcaagatatcattcgcttgcagtaaaggaagagacactgccggaagaactggttgtgacagcgcgaagcgaagataacgagattatggcgatggaacacagagaatatccgatctttgggttacagtttcatccggaatccgtgatgacaccgcagggacttcagatgatagagaactttattaactatgcgaaatcgttgaaggagaattaagaaatgatcaaagaagcaattataaaattatcaaagaaagaaaatctcacctatacagaagcagaagaagtaatgaatgagattatggaaggaatggcatcagatgttcagaagtcagcatatctgacagcactttccatgaaaggtgagacaatcgatgagatcacagcatcagcagcgggaatgcgtgcacactgcatcaagcttttgcatgacatggatgtgctggaaatcgtaggaacagggggagacggagcaaattcatttaacatttcaacaacatcctcccttgtgattgcggcagcaggaatcccggtcgcaaagcatggtaaccgtgcagcatcttctaagtccggtgcggcagatgtacttgaagcacttggagtgaagatcgatgtcgcaccggagcgcagcacacagcttctcaaagacattcagatctgtttcttatttgcacagaattatcatattgcgatgaaatatgtcggaccgatccgtaaagaacttggtatccgtaccgtattcaatattcttgggccactgtctaatccggcaggagcgaacatggaactgatgggagtttatgatgaaagccttgtagagccacttgcaagagtcatggcgaatctcggagtcgttcgcggaatggtcgtttacggacaggataagttagatgagatttccatgtgtgcaccgactacagtctgtgagattaaagacggaacatttacaagctatgagatcacaccggagcagtttggttatgagagatgcgaaaaaggtgcactgataggaggaacacctcaggaaaacgcacagatcacattggatatcatttctggaaaagagctgggagcaaagagaaatgctgtttgcctgaatgcaggagcagcaatctatcttgcaggaaaagcagattcaatcgaagcaggtgtaagaaaagcggaacagatcattgacgaaggacttgcactgaagaagctggagcagtttaaagaagaaagtaataaataaaaagtctgatccccggctatgcaggggagaatggaagaagcaacttgaaagaaaaagaggaacaaatagtatgaatatactcgagaaaattaccgaacgcacgaaagagcggatcgaagaagaaaagaaaatagttccattagaagaggttcgaagacaggcggaagaaaaaggaattaaagatcaaatccctgcattcgaacaggcacttcgggcagacggattatcctttatctgcgaggcaaagaaagcttctccttccaaaggattaatcgcaccggattttccatatgttgagatcgccagagaatatgaagcaggcggcgcggcagcaatctcctgtctgacagaaccgttttggttccggggcagtgatgcgtatctgaaagaaattgtgcaaaatgtatccattccggtactcagaaaagatttcacctgtgatgaatacatgatttatcaggcgaaagcaatgggagcctcggcagtacttctgatctgttcggtattagaagatggcaggttaaaagcgtatcatcagctggcagacgaactcggactatctgctttggtagaaacacataacgaagaagaaatcttaagagcacagaagatcggtgcaaagattatcggtgtaaataaccggaatctgaaagatttcacagtggatatcaagaatagcattcggctaagagaaatggtcagttcggaaacagtttttgtatctgagagcggtatccgcggagtggaagatatgaaagcactttatgaaaatggaaccgatgcggtactgatcggagaacttctgatgagaaaatctgatcggaaagcagcactgatggagttgaagcagcagacaggaaggcagctagatatgaattagcggaagatatagtatgagacaagaaaaaatgaacatgcccaagattaagatctgcggtttgagccgcccgaaagatattacttatataaatgaggcaaaaccggattattgcggatttatcatcgatgtgccaaagagccggagaaatgtatccatttcgaaagttcgtgaactggttcaaaatcttgaatcgcagatttacccggtcggagtatttgtcaataaagactgcggcgaggtcgcacaattattaaatgaaggaaccattcagatcgctcagcttcacgggcaggaagatgaggcatatataaagaagttgaaaagtctgacagaccatccggtgatgaaagcattttcgattcaggagaaaaaagatcttgatgcggcggcagcgagcagtgcagatctgattcttctcgatcatggaaaaggcggaaccggcgagacatttgattggagtcttttggaaggctggacaaagcggccgtatttcctcgcaggaggactgaatccggagaacataccggaggcaatacagcgaatacacccttggggaattgacctgagcagtgcagtggagacagatggaaagaaagatcgtgagaaaattcttcaagctgtgaaaactgtgagaaattttgaaagcagtaaacattttttgaaaacaaaagagtatacaagtgaacgaataaatttaccaaaacaatagaaacaagaaagaaggagagacaaccatgacaaaaggaagatacggaatccatggtggacagtacattccggagacactgatgaatgcagtgatcgaattggaaaaggcgtacaactactataaaaatgacaaagaatttaatgacgaactgaatacattattaaatgaatatgcaggcagaccgtctcttttatactatgcagcacgtatgacagaagatcttggcggggcgaaaatttatctgaaacgagaagatctcaatcacacaggtgcccataagatcaacaatgtgttaggtcaggttcttcttgcgaagaagatgggaaagacaagagtgatcgctgagaccggtgcaggacagcatggggttgcaacagcgacagcagcggctctgatgggaatggaatgtgaagttttcatgggaaaagaagatacagagcgtcaggcattaaatgtatacagaatgcgtcttctcggagcacaggtacacgcggttacaagtggaactggtactttaaaagatgctgtttcggagacgatgcgtgagtggacaagaagaattgatgacacacattatgtactcggatcctgtatgggaccgcatccatttccgcagatcgtgcgtgattttcaggcagttatatctaaagagatcaaggagcagatccttgaaaaagaaggaaaactcccggatgcagtgcttgcctgtgtcggcggaggatccaatgcgatcggtgcattttataatttcattgaagatgaaggcgtgcgcctgatcggatgcgaggcggcaggacgcggcgtgaatacagcagagacagctgcaacgatcgcgaccggtaagcttggaatcttccacggaatgaaatcttatttctgtcaggatgagtacggacagattgcgccggtttactcaatctcagccggactggattatccgggaatcggaccggagcatgcagacctttatgataagggaagagcagaatatgtagcaatcacagatgatgaggcagtcgatgcatttgagtacctttctaaattagaaggaatcattccggcgatcgagagtgcacatgcagttgcatatgcaagaaagcttgcgccgacaatgggaaaagaccagattattgtaattaatatttcaggacgcggagataaggactgtgcagcaatcgcacgttacagaggggaggatcttcatgagtagaatacaggaagcatttaaagggaagaaagcatttataccatttgtcacatgtggtgacccggatcttgagacaacaaaacagatcgtctatgagatggagaaagcaggggcggcgttgatcgagcttggaatcccattttccgatccgacagcagaaggaccggttatacagggagcaaatctgcgtgcgctgacaggaggcgtgaccacagataagatcttcgatatggtaaaagaaatccgtcagaatacaaagattccacttgtttttatgacatatgcaaatgttgtgttctcttacggaacagaaagatttcttgagaaagcgaaaaatgtcggaatggatggtctgattcttccggatgttccatttgaagagaaagaagaatttgacatcgtgtgcaaaaagtacggaatcgatctgatctcattgattgcaccgacttctcatgaccgaatccggatgattgcaaaagaagcatcgggattcgtatattgtgtttcttcacttggtgtaacaggaacaagatccgagatcacgacagacatcggagcaatggtgaagctcgtaaaagaggaaaatgatattccatgtgcggttggattcggaatctccactccagagcaggcggcgaagatgtgtcagagcgcagacggtgcgatcgttggaagtgcaatcgttaagttgtgtgagaaatacggaaaagactgcgtgccgtatgttgcagaatatgtaaagagtatggtagaagcttgtaaataagtgaaaaggatctgggattcgaaatcagagtattcttttgataataataggaaaatacctcttttgataaggagtcagatgtggtatcatagatattagatttgttgcttgatctatgatacgaatccgaaaggagaatacgaatgaagaatcgaaaacagcctttattcaaaagctttggctatgcctttgaaggaatctggacagggatttcaaaagagaggaatatgaagattcattgccttgcagtgattcttgtaacagcagttggaacatttgtaggattaacaccgatggaatggtgtatctgtcttctcctttttggaatggtgatctcactggaacttgtgaatacggcagtggaagctgttgtcgatcttgtgacagaagagagaaagccacttgctaagatcgcgaaggatacggcagctggtgcagtgctttttacggcaatcatggctgtgatcatagggtgtattatatttatacctcatttcattacgctactgtaatataaagaaaagcaaccagaaaggaaaacaaagagatggatgagaataaagtaattgtcagtacagagatgaagcaggtattggtgaatctgcgaaatctcgaagagatttatgtgatcatgtcaggtgtgacgaagatgccgtttgtcctctgtgatgaagagacatttgatgacgaggttctggtttattatcaggaagagtctgcaaaggaaaaggcaaagacgcttgcagaagatcgttatcatgtaggaattgccaagatcgaaaagaatatcagacttggattttttacaaacctgtatacaatgggcgtgaatgcactggcagtgaatgttggtacagaggaggagatcagggtacagctggaacatcttgtagttcgtaagaataaggaagaactgcctgaaggaaagaaactgatcgagaatccggagcttcatctgacagcaatgtatctgatgcaggagatgcaccgcaatatcggaccggagatgccggagaatgtgaaggaacttcaggaagagatgatggcgcattataagaaaggaacctttatcgtaggagttcaggaagataatcaggttccacttctgagacagccggacggaagtctgtatcagccgatctttacagatatgatagaatttaccagatttgcacagggcaagaagatgaagacagcagcaatcccggcggataagattccggagatactgattccggatgcaaagggagttgcaatcaatccatttggtgtgaatgtacgtctggatattacaaaagcaaataagcaaaagccagaagcataaaatgaagagaaaataatttaaatcaaaagaaaaaaattgatttactggaatgatcactaagtaacatattcaacaaaaaaacaggataaatattgttgaatattacagattgactgttggaagtgagtttggttatactatacgtggttaaaagagaaaagcgcacgatagagtgttactggtaaagcaggcataaactatccttaataagttcaccagataaggtggacttggttattgaggattagtttatgccttttttgcgcattatagtataggataagtaagttgcagaactgtgccagcacaagaaactatgggatgcgtcaactctgtgagaaatgatactaggaggattacagatgaaagacaagatttttggagtattgcagagaatcggaagaagttttatgcttccaatcgcaattcttccggtagcaggacttctgcttggagtaggaagttcatttacaaatgcaacgatgattgagacatatcatcttcaggcaattttaggcgaggggacaattctgaattccctgctcacaattatgagcaaagcgggaagtgttatttttgataacctgccgatcatttttgctgtcggtgtagcaatcggtatggcgaagaaagagaaggaggttgcggcacttgcggcaatgatctctttctttgtaatgaatgcaacaatgaatgccatgcttctgatccgtggagatcttcttgcagacggaacgcttggagccggagttctggaaggaactgtgacaagtgtctgcggaatccagacattacagatgggtgtatttggcggtattatcgttggacttggagtagcagcacttcataataagttttacaaaatccagcttccgaatgcattgtcattcttcagtggatcaagatttgttccgattatttcaacattgacttatgtggctgtcggaatcgtgctctattttgtatggccaaccgttcagaatggaatctatgcactcggcggacttgtaacaggaacaggctatattggaacattgatctttggtattattaagagagcgttgattccatttggacttcaccatgtattctatcttccattctggcagacagcggttggaggaacaatggaagttgcgggacagctggtacagggcggtcagaacatcttctttgcgcagcttgcagatccatccacagtacatttcagtgcggatgcgacaagatatttttccggtgaatttattttcatgatctttggtcttccgggtgcggcacttgcaatgtatcagtgtgcaaaaccggagaagaagaaacaggcaggcggacttctgctttctgcagcacttgcatgtatgatgaccggaatcacagagccactggaattctcattcctgtttgtagcaccgatcctttttgcggtacaggtgatccttgccggatctgcttatatgatcgcgcatatgttaaatattgcagtaggacttacattttccggtggatttattgatctgttccttttcggtatccttcagggaaatgctaagacaagctggatcagaatcatcccggttggaattatttatttcttcttatattatatcatcttccgtactttgattctgaagctgaatctgaagacaccgggaagagaagatgatgatgcggaaacgaagctgtatacaaaagctgattataaagcaaaagtagatggaaatgatgcagattctgaaaatgaaatgacaccggaagatcagaagagcgcactgatcacaagaggacttggtggaaagaaaaacatttctgatgtagactgctgtgcgacaagacttcgttgtacggtagtaaagccggaactggtaaatgaagatgtcttaagaatgacatccccatccggaatcgtaagaaaaggacagggaatccaggtaatctacggaccggctgtttctgtgattaaatccaatctggaagattatctggagaaagctccggatgtggaatatcttccggaagaaaacgaaaacagcgcagaagaaacgaataaatgtgcagaaacaaaagatgaagcgaagaaagatgagaacaaaactgttgcagccggaactgtaaagaaagagctttgctctccattcacaggagtggcagcaccgatcgaagaagcgtgtgacgaagcatttgcagggaaaatgatgggagacggttatctggttcgcccggaagagggaatggcttatgcgccggaagatgcaactgtatcttttatcttcccatcaaaacatgcagttggtctgactagtgatgacggaaccgaatatctgcttcacattggcgtggatactgtaaatctggatggaaaaggattcgaaacttttgtaaatgacggagatcgagtaaaaaagggtgacaaactgataggttttgatataaaatatatccaagagcatgcaaaatccgatgaatgtatggttgtatttacaagtcttcaggaaggtgaagagatcagaatgtctaagagcggaaaagtagagaagcttgagaagacagcagaaatcgtaagcttgaattaagagaaagaaagagaggctccggggggatgtatcgagtcattaaagttctgaataataatgggattcttgtatatcatgttgagacagggaaggagatgatccttctcggaaacggtgtgggatttggaaagaaacctacagaacagatcgagaaacttcccggagccaaagtatattctcttatcacaagaaggaagcaggagtctgttctgaaaacggtcaatggaatccgcccggagtttattgaggcaacaggaaagatcattgaagaagcagagaacgtgtttcagaagatcaatcatgagatgttgcttccgttggcagatcatattgcgcttgcagcgaagagagcgaaggagaaccgccagcttccgaatccatttacaccggatatccgtgtgttgtttggagaggagtatcaagtggccctgaaagggcgggaaattatacagcagctgacaggatatgaaatctcagaggatgaagtcggattcattacgctacatatccatgcaggcctttctgatgaggcagtatcccagactctggatgcgaccaggattgtaaatgaagggattgccatgattgaacaggaattcgatcagaagctggagagcggctcacttggatgtacacgtctgatgagtcatatgtattatatgattctgagaacccgtaagggtgaagggacgaatgcagactttaatgatttcatttttcagaattacccaaggaccggagaggcggcgaagagagtgtgtgactatatgtccagacagctgaaacaaccggtcgcaaaagaagaaatcggatttcttgcaatccatatccagcgggttatctcgccggatacggtatgaccgtgtgctcttgaaatactgtatactatgatatatagtagtggataagagcgaaaggggaatccgcagaatgtataagattctaatcatagaagatgaccttgtgatggcaggggcaattaaaaaagagatggaagcgtggggaaatgaagcacgttatgtggaagattttgcaaaggttcttgagacatttgcagagtacggtccacatctggtgcttttggatatcacgcttcctttttataatggataccactggtgcagcgagatccgtaagatatcgagcgttccggtgatctttatctcttcagcagcggataatatgaatattatcatggcgatgaatatgggcggagatgactttgtggcaaaaccgtttgacttaagtgtactgacagcgaagattcaggctctgctgaggagaacatatgatctatcaggaaaagtaccgatgctggaacatagaggagcaatcctgaacctctatgatacaacaatgacttataatggagaaaaaattgagttgacaaagaatgaatttcgtatcttacagacattgatggagaataaaggacgcgtggtcagcagagacacgctgatgacaaagctgtgggagacagacaattatatcgaagagaatacattgacagtcaatgtcggaagacttcggaaaaagctggaaaaagcgggaatggaaggctttatcaagacgaaagtcggcggtggatatatcatcgagaaggagtaaaaatgtttttacaatatttgaaaagaatccgatttgtgcttctgtggagtttgctgtgtgcgggaatcctttttctgatttttgtgttggaagagattaatctgaaggcagcggtttatccgacagtgttgtgtctggcatttggattactttttcttctctgtggatatttgcggtataagaaaaccgggcagaagctggaacatttgctgcaaggagaaggaccttatgaggattcgcttccaatcgcacaagatgggattgagtcaggatatcaggagctaatcagaaaagaagaacaacagcaaagaaaagaacatgccagatgggagaagtccggtcaggacatggaggactattatgcaacctgggtgcatcagatcaaggcaccgatcgctgtgatgaatgtgctgctccagcaggaagataccgagacgaatcagaatctgaaagccgaactgttccgggtggagcagtatgtggagatggtacttgggtatgtgcgtcttgacagtggcacgaaggatctggtgatcgcacggtatcctttggatgaaattataagaaaatcgatccgtaaatatgcaggacagtttattcgaaggagaatccgtctgatctatgaagggacagatcagatcgttttgacggatgagaaatggctttcgtttattattgaacagttgttatccaatgcggtgaaatatacactgaaaggaactgtgacgattattgtcagtgaagaaaagaaattgacagttacagataccggaatggggattgcaccggaggatctgccgagaatctttgaaaaaggatatacgggatataatggaagaatggaacggaaatcaacgggaatcggtctgtacctgagtcagatggcggcaaagaaactggggcatcagatcacggttgtgtcgaagctgggggaaggcagcagttttacaatagatctggcagagtatccgttgagagcagagtaaatcactaaattatcagagagaagcaagtgacaaaattgtcacatcagacagctggaatgtcacagaaatcaatgttggcattctggctgtattgctatactgaggatgttgaaagaaagaagaggaggtcgtaagaaatgacagttttggaagtagaaaatttgaaaaaaatataccgtccgcgttttggcggtaatcaggtacaggcactctctaaggtaacattctcagtagaagagggcgaatatgtagcaatcatgggagagagtggctcggggaagacgacattactgaacatgctggcagcattggataaaccaactgaaggggaagtttatctggatggaaaaccgttatcagcaatccgtgagaaggatctgtccaagttcaggagagatcatcttgggtttgtatttcaggatttcaatcttttggatacatttaatctaaaggacaatatcttactgccattggtactgcagggagttgattacaggaaaatgaatgtcaggatgatgccaatcgtgaaagaacttggaattgcaggacttctggagaagtatccatatgaagtatcaggaggacagaagcagcgtgcagcagtggcgagagcactgatcacagatccgagactgatcctggcggatgagccgaccggggcactcgattcgaaatcaacggatgaattgctcggggtatttgagcggatcaatcagtcgggacagacgatccttatggtaacacattctgtcaaagcagcgagcaaggccgggagagtgttatttattaaagacggagaagttttccaccaggtatataaaggcgaacagacagatgaacagttctatcagaatatctcagcgacacttacaatgcttgcgacaggtggtgagagacaatgaaaagtggactttatatgaaactttccgttaatggaattaagaaaaataagaagctgtatcttccttatctgatcacatgtatctgtatggttatgatgttctatctgatcgattatcttgcagtgagcccacagtttgcccagatcaaaggtggggatactatgcagatgatccttggatttggctccggtgtgatcgcaatcttttctctgatccttctgtattacacaaattcatttctgatccgcagacgacagagagagtttgggttgtatcacatccttggaatgggaaaaattgaccttgtaaaaatcatggttcttgagaatctgctcatcagtgttctgacgattgcaggagggatcgtgggaggaatcctgttttctaaattgggggaacttctggcagcgaagatacttgtaagtaatgccggactttctatgaagatcagtgttcaggcactcgtagctacggtcctgttattcctggccatttttgcattgatcatgcttcggatgatcgtgtctgtctatcgattaaaacctgtagaacttttaaaaagtgaaaagacaggagagaaacccccgaaggcaaactggatctttgcagtactcgggttgcttctgcttggtgtggcttattatttatctctgacaatcaaagatccgcttgtagcgatgatctggtttatggttgccgtcgtgctggtaatccttgcaacgtatctgttatttattgccggctcggtcacattttgtaaaataatgcagaaaaagaaaggatattattataaaacaaatcattttgtttcactttcatccatgatttaccgtatgaaacgaaatggggcaggattagcgtctatttgtattctgtctacaatggttctggttatggtatcttctacaaccagcctgtatctgagtatggaacatggcttgaatcttcgatatccgaaatctgtccagattgagatgtacacgaaaccggagcagacggaagaaatgaaagagaatcagaatggacagattatagagcttgtacagaaggttttgaaagaacataaccagaccgcggagaatccggagaattaccggatgcttacagtcagtggaattgtttcaaaaaatgaaatctattttaatccggagaatgctccgggagtcaatgaagtgaatacatttgatcatttaaaaatgttctatgctctgccgttggaagcatataatcggatcatggggacgaatctggagcttgctcccggggaagcgtatctgtatgcgaaagattccgatttcccctatgatcagatcacggtggagaattccgggacatggaggattaaaggacatttggataaaatgatttcaaatggaaataatatggcaaatatgaacagcagcttctatctggtggtttccggactggaagatataaaagctttggaagaaggaaatgtttccgtttacggtgtcaatggttcttatgagaaatggtactacaattttgatctgtcctgtggagatgaagagcagatccagattcaaaacgagattgacaagaaaatcaatgcattggctgaacaggaatcagaggaatcagataccctattttttggagcttctacagacagcagagccgcatcaagagctgattaccaggctttgtacggcggtctgttcttccttggaatccttcttggagtcgtattcattcttggaatggtgctgatcatttattataaacagattacagaaggctatgaggatcaggacagattccagattctgatgaaagtggggatgacacagaaagaagtgcgtcagacgatcaattctcaggtaatgacagtattcttcctgcctcttgtggctgccggaattcatacggcatttgcatttccaatgatagaaaaaatggtgcatctgcttgctttttctgacagaaaattcctgattctggtgaccatgtgctcctatctggtatttgcattattttatatcattgtgtatctggtgacttcgaaacagtattacaaaattgttagcggaaaacaggaagaaagtcttttttcttaattcaaagagtgatagaatagaattatcagaaaaaggaggacttgcttatgatggatcacacaattattacaattggaagacagttcggaagtggcggtcatgaagtaggaaacagactggcagagagactgaacattcctctttacgatcacaatctgattcgaatggcagcaagagatcttggaatttcgaacgaagaagccggaagagtagatgagatgagactgggaaatgtgttatcaagctattatattggaatgggcgattacacaacatttatgcttagtcctgaggccgagaagccattgagtgacaaagtttttgagacgcagtcagcaatcatccgcaagctggcagaacgtggacctggaatcttcgtgggacgctgcgcagattatgttcttggggattattcaaatgttgtgaatacatttatctatgcttataaggatgatagaatcaatcgaatcatggatatctataagctttccgagaaagaggctgtagataagattaagaagattgacagagagagacgcctgtattatgaaggtagaacagaccgtaagtggggcagtattgaagcgaatgcaattctgctgaattcaagtcttcttggaatcgatggtgcggtagatgcacttgaggcgatttatcataagtgggaaaacagataacaaaataagcagaaaaaatgaaataattaacaaaaagtaagagggtgtcgtttagtgcgacaccctctttgttacgtctttattctggaatctgtatttatttcatcatgccggcaagaatctgattgacttctttaccatcagctttgccttttacctttggcatgagttctttcatgatcttacctttatcctttgctgtaggagcatcgataccaagatctgcaagaacggatgtgatcactgctttgatctcatcttcgctcatcatctttggtgcatattcttcaagaacagcaagacgcttctgagcctcttcaatcagatctgtacgatcttcaggtgtcatatcaattgtttcttttaactgtttgatttcttttaagattacctgtccttcttcctcttctgtcaggtcggcacgtttgtcgatagctttattcttcagagaggagagcagaaaggaaagtgcggcttttcgttctttgtctcctgccttcattgcagcgaccatagcgcttctgatttcatcaattttgctcattttagagtcctccttataatttaatatgcttgaaatagttacaattattgaaaagagcggattgctcttgattcataagataaattttagcagatggtggtttatattgcaagagtgcactctgttttgtggaaatatatgaaagaaatgcatgaaaagcataaaaaatcagaaaatttacgaaaagtaaaaatataggttgacaatattgggctcgaggagtaaactacgtgacataaaagcaaaggcgctttgagaaacagatctcagagtgcctttttcttttaataaaatatggtacctatagatttgccgcgaacagcagcaagtctcaatgacacaaaggcgtgtcttacagcaagaaccgattcagggggatggttcaacgaagctgtgagatatgtctttttagtttctaggtatgaggatgaagtagtatgacacaagaaattattactcagattacagacacagtcggaacagaagtgttcggcatctggttcctgatcggagctgcatttgtattctttatgcaggcaggattcgctatggtagagacaggattcaccagagcaaagaatgccggtaacattatcatgaagaatctgatggatttttgtattggaacaatcgtgtttattttccttggatttggattgttactcggggaagatgcacttggcggactggtaggagttccaacacttggaatctttacagattatgcaaactttgactggtctaattttgtattcaacctggttttctgtgcgacagcagcaacaatcgtatcaggagctatggcagaaagaacaaagtttctttcctattgtatttattccgcaatgatctccgcagttgtgtatccgatcgaagcacactggatctggggaggcggatggctttcacagcttggcttccatgattttgcaggatcttgtgcaatccacatggtaggtggagtaacagcatttatcggagctgcaatggaaggagccagaattggtaaattctcaagagataagaatggaaaagtaacaaaagtccacgcatttccaggacataacctcgtaataggtgctcttggatgtttcatcctctggtttggatggtatggattcaacggtgcggcagcaacaacaggcccacagcttgcatctatttttatgacaacaacaatcgcaccggcaacagcaaccgttgtatgtatgatcttcacatggcttcgttatggaaaaccagatgtgtctatgtgtctgaatgcatccctcgcaggtctggtagcaatcacagcaccttgtgatgtgacagatggattaggagcactgatcattggagcagttgcaggagttctcgtagtatttggcgtttggttctgtgataatgtagtgcatgtagatgacccggttggtgccgtagcagttcattgcttaaatggtatctggggaacaatcgcagttggtctttttgcaacaacaaatgcgccggaaagtacactgaaaggtctgttctacggcggcggattcggacttctcggaacacagcttcttggtatagtaacagttcttgcttggacagttgtaacaatgacaattatcttcaaagtaatcgatatgacaattggacttcgtgtttcagaggaagaagagattgttggtctggattccaaggagcatggtcttgcatcagcatatgcaggattcagcatcatggatattacggaaggtgcaatgaatgaaaatgaaaacacagatcttggtgtagcagattatgacgcagcatctccaatccagagagcagcatctgtaccggtagcaggaccggtagatgcagatacaggaatgcataaagtagttattatcgcaaagctttccaagtacgagcgcctgaaagcagcattgaacaatcttggtgttacaggaatgacagttacccaggttatgggatgcggtatccagaaaggtgccggcgagaaataccgtggagttgagatggacgttactgttctgccaaaggtaaaagtagaagttatcgtaggaaatattccggttgagaaagtcatcgaaacagcatccaagacactgtatacaggacatgtcggtgatggtaagatctttgtatacaacgtgcagaaagtagtaaaagtacgtacaggagaagaagatctcgaagcattgaaagatgtagaataatacttgataaaaaaaataatctcccaaaagcagtaaagactgtttttccggagattattttttatgattattgaacgattttttgaataatttttttttataaataagattgaaatcttatatactactatatttaataagaagtaacagcgtaaaaaacaacacaggatggtaaaaattacctaaaaattttttagattatcatataatttgaaaagaaaaatgtgaaaaaaatactattttatgtaaagagagttaaataaacataaaatttttctttaaaaacctaaaaaaatgtgatatagtgtaatacaaacatatgatattgaaattcaggagggaaaattaagaatgaacaattatatgtatctggttccagttgcagctgtcattgctcttctttttgcagcatatcttgcagcaaaggttagcagacaggatgccggaacagaaagaatgaaggaaattgccggtgcaatcgcagatggtgcacgtgctttcctgacagcagagtacaagatccttattgtattcgtagtagtactttttgtactgatcggattaggagtaggtaactgggtaacagcagtttgcttcgtagtaggtgctctgttctcaacaatcgcaggttactgcggaatgacagttgctactaaggcaaatgtcagaacagctaacgcagctaaagagagcggaatgaacaaagctctttccatcgcattttcaggtggtgccgttatgggtatgtgtgttgctggacttggtgcacttggtgtcagccttgtgtacatcgtaactaagaatgtagatgtattattcggattcagccttggtgcttcttccatcgcattgtttgcacgtgttggtggtggtatctatacaaaggcagcagacgttggagctgaccttgtaggtaaagtagaagcaggtatcccagaagatgatccgcgtaacccggctgttattgctgacaacgttggagataacgtaggtgacgtagcaggtatgggagctgaccttttcgagtcttactgtggatctctgatctcagcactgacacttggtgttgcagtaagcgaagtttcaggagtattattcccacttgcaatcgcaggatgtggtctgatcgcttctatccttggaacattcttcgtaagaggcggagagaacacaaatcctcagaaagctcttacaaaaggaagctatgcttcttcagcaatcgtaatcattgcttctttagcacttagctgggtgcttttcggaaacatgaacgcagcaatcgcagttatcgctggtctgattgttggtgttatcattggtaacatcacagagtactacacatcagcagattacaaaccggttaaaggaatcggagagcagtctgagacaggtgcagctacaacaatcatcagtggtcttgcagttggtatgaaatcaacagctatcccgctgcttctgatctgtgtaggtatttttgtttcttataatgtatttggtctgtatggaattgctcttgcggcagttggtatgctttctacaacaggaatcactgttgcagttgatgcatatggtccgatcgcagacaacgctggtggtatcgcagagatgtccggtcttgatgagtccgttcgtgacattacagacaagcttgactctgtaggtaatacaacagcagctatgggtaaaggatttgctatcggttctgcggcacttacagctcttgcgctgttcgtatcttatgcagagacagtaggtctgaaatccatcaaccttcttgactacaaagtaatcatcggtatctttatcggtggtatgcttacattcctcttctcagcatttactatggagtctgtatctaaggctgcatactcaatgatcgaggaagttagacgtcagttccgtgagaaaccaggcatcatgaaaggtgaagagaaacctgactacaagtcatgcgttgctatttctacaacagcagcacttcacgagatgcttcttccaggtctgatggcagttatcgttcctgtagtagtaggtgttcttcttggagttgacgctcttggcggacttctttcaggatcccttgtaacaggagttcttatggctatcttcatgtcaaatgcaggtggtgcatgggataacgctaagaagtatatcgaagaaggaaaccacggcggaaaaggtagtgaggctcataaggcagccgttgttggagatactgtaggagatccgttcaaggatacatcaggtccgtctatcaacatcctgatcaaacttatgacagttgtatcacttgtattcgctccactgttcctttctatcggaggacttctgtaatacttttgtaatccatatatggatgacattaagaatataagttgaaagaaaacgttctcgggggatttccccggggacgtttttttctgtgttgcttttacttgttttgttatataactataaaactggcttgtataaatattttaaaactggatatatctaacagaccagggcgctgatataataaggcggtatgttgggaaaattcacttacaagtctgacattagctgtcagattattactcaacataagagataacaaacaggagatttacaaaatatgaaaaacgaaagtatcagcacaaagaaaatcgtaatgactgcattttttgcagctattatttatctgggaatccagtctttccgtattccgcttccggcggctgtcggaacaccatttctgcatttcggacacattttcgtaatgcttgcagtattaatgcttggacctaagctttcaactgtggcaggagttctcggacttctcgtctttgatgtattgaacggttatattcaggcaatcccgaatgtattcgtcagcacaattatcaaatgtctgcttgtgggcatgatctttcagtctctgaagaaaaaagctcagggagatgcgaagaaggaatatggttatgcagtcctctgtgcggctatctacggcgttacgaacattatcgtagactttatctggtcaacagttgaactggttgttctcggcagttcctggagcgcagcgttggcggcagagatcacatctatcccggctacgatcatcaatgcaggatttacagtagtaggaattgcgattctgtatgtgccggtgaagaaggcttacaagagaattcttggagcataaggaatcaatgagcataggaagtcaatgccatagtacgtatgcctgataatcaaaaaggagaattattaagttggatattgcaaagatacagaagttattgcaggaagcaaaacttgacagatggttatttacagattttcagggacatgattttatcacaaaagagtttcttgagcttggaaatcgtttctgcacaagaaggctgttctatttgattccggcgcagggcgaaccggtgaaggtgctctcagcgattgaaccacttcttctcgaacatctaccgggaaagaaaatattatatcaagggattgagggacagaagaaagtgttgtcagagttattgaagccgggcatgaagattgcctgccagtactctccgggcggaaatgtcccgacgatcagctctatggatgctggcctgatcgagtatcttagaacttacggaatcgaaccggttacaagtgcagatatgatgcagcatttcggtgcggtactaacggaacatcagatcgagacacaccgacaggctggagttatcatacataagattcttactgatacattttcttggatcagagagaatatagatgcaggtaattatattgatgagtatgcgatgcttcagcagatgcaggaactgatagggcaggagaatatctatatggattctccgccgtttttcggagttgatgagcatgcctgtgatccgggatatgaaccgaaagaaaatggttcgaggcagattcgtgaaggcagcagattgatcatagatattgccggacgtcttccggaagaggatgcggtatattatgatgtatcctggtgcatgaatgtcggagaaaagattgatccggagtatgagaaatggtttcagatcgtatatgatgcgcgggaagatgcaagacagtttattcaggcgagattagatgcaggagaaaaagtcagaggatatgaagtggatcgaaggctgaaagaaagattcgaacagcttggatgtgcacagtatctgatgcaccggacaggacataatatcggtcacagatgtcatggaattggtgccaatctggatgattatgaaacacatgatgaccgctgtctgctccctggtacgatgttttccatagaaccgggactgtatacagataagtatggtgtgagactggaatatgatgtgcatattacttcggagggagaaacgaaagtgtatggaccggtgcaggatgagattcttgtgatttgatcaagggtgaaagaaatatagttgaaaaagtgaaagaaatggcgaagatttgtaccagtaaggtgtaagcttcgccctttttgttaaatacaattcttgataatgtataataggtgtagtattcttattagaaataatacatcagtaaaagaaataaacaggaggttattcaaaatgaaacaagtagagacaacaagagaagcaataatcaacagacgaagtgttcgcaagtataaaactgatatgattccaagagacataatcgagcgaattgtagaggcggggacttatgcagcaaatggaagaggacaccaggcatctattattctggcagtgacaaataaagaattacgagacagactttcagagatgaatcgtaagattggtggatgggatgaaggatttgatccgttttatggagcacctgtggtattggttgtactggcagagaaagactggccaacacatgtgtatgatggaagtcttgtaatgggtaatctgatgctggcagcacatacagaaggaattggaagttgttggattcatcgtgcaaaggaagagtttgaaagtgaagaaggaaaacagattttgtctgatcttggagtgacaggagagtatgaaggtatcggacactgtatacttggatatccggatgaagaaatagaagaggcgaaacccagaaaagatgattatgttttctgggtggagtgatagcccataaatataatagagggttactcaccatagcttcaaactatgacaaatgcataaatttatatatttttcaaaataagcatggaatgataagatgattgcagataaaacatcacttacaaaaataaaaggagaattaatttatgagcaaatatcagacaccatgcagatacgattttgtgggaagttttttgagaccggaagaggttaagaaagcgaatgcagattatcaggaaggaaagatcagcgaagcagaaaagaatcagatcattgataaagcggttacagaaattgtagcaaagcagaaagagcttggatttcatgtgatcacagacggagagttcagaagaacttactggcatctggattttatgtggggatttgaaggtgtcggtcatgaacagaccggcagcggggtacagtttgatggagagctggcatcactggaagatacttatctgacaggaaagataaaggcaaaggcgcatccgtttgtagaacatttcaaattcctgaaacagtttgaggatgagaacacagttgcaaaatatacaattccggcgccggcgcagatgttccagcagatgattattccggtcaactataaaaatacgagaaaatattatgagacaaacaaagaactgatccacgacattggaacagcttatcaggaagtgatccgtcagttctatgaagcaggatgcagaaatcttcagcttgacgactgtacctggggagcaattgtcggagatgcggcaaagcagagatacaaacttcttggaacggatattgaagatgtgaaaaaagagcttcttgaagtgaataaccttgcactggaaggaaaaccggaggatatggtaatcacttcccacatctgcagaggaaattatcattcaacattttttacaagcggaccatatgattctgtagcagattatgtctttgcaaaagaaaatgtggatgcattattccttgaatatgatgatgcaagatccggtggattcgctccgcttgcaaaggtatctccggataaaaaagtggtattagggttaattacaacgaagatacctcagcttgaggagaaagaagttgtgatcaagagaattcatgaagctgcaaaatatatcccattagacagactttatctcagtccacagtgtgggttcgcttcctgtgaaatcggaaacaaactgacagaagaggaacaatgggcaaagttaaagcttgtgaaagaaattgcagaagaagtctggggagagtaataagagttgagttgctgcttatacagagtgtaaacggcaactcaatttttatgcacaatacttcttcaacattcttctggccattttttcatcttctccatgaataacgaggagaaacggaagaccaagctggatcgtggcaagctcagaaagatcttttccgttgatatctacgcgattgtggttctcaagatcctggatgcgcacatccgaagaaagatttttacaagtgtgtgaaaaagtgagaaattgtccggttgtgagaaatttaatattttgcttgatcatgatatcgcccctcgtaaatgaatgtgtttgattttttcgtcattcagtatataataaataacaaagaaataaaaatacatatttgttatgacagatatacatttcttatatgatttatcagatgtggtttgactcccacctctgcaggtggagagtaacagattagtgtcagtttaggggggacttatggaaattacttatgattattaccggattttttattatgtagcaatgtataagagcttttctaaagcggcgaaagtattgatgagcaaccagccgaatattactcattttatgaataatctggagaatcagcttgggtgtaaattgtttgtcagatctaatcgaggagttacgcttacagcggaaggagagaagctgtatcagcatgtttctgttgcatatcagcatcttcatgcggctgaagcggagcttgcaatggagcgaagcatggagagcggaagtatcacgatcagtgcgagtgagattgcacttcatcttttacttcttcctatactggggcgctttcataagcaatatccgggtgttcggctgagacttctgaatcattccacgccggaggcagttgagtccgtcaagaacggactggcggactttgcagttgtgactacgccgcttcaggcaaagaagccgttgaaaagtacttctttaatgtcttttaaggaaattgcagtgggagatcattcttttcaggggaaagaaaaaccaataaggctgaaagacttaattgagaatccgttgatttctcttgggcagggaagcacaacctatgagttctattccaaatttttcctggagaatgatctggttctatctccggatacggaagttgagacgatcgatcaggtgttgccgcttattatgaatggactgggcattggattccttccggagctgttcgtaagaccagtgatcgaggaaggaaaagtctgtcagattctgttgaaggaaaatattccggaaagagaaatctgtctggttgagaatcacacatttccgccaagtatcgcggcggagatgttcaaaaaaatgttagttctgaaataaggtattgtttaagaagatatcatggattcaatctattcctatgtagaaaatatatatcagatatgtgaataaaacagtatgcgccggtttgactttagaaccggcgctttctatattaataagtaggattttgttctgttttaacaggcgaaaaacaagaaataacaaaggaagtgtgagtatgcagacagtattaccacgtgaagaagctgtagaaggagttatatctaaggttcttgagtcacaagaggcctgtgatcggctaaatgaagtattttatgagcatttggagaattatcaggaaataaatgacgatggtgacagacattttgcagaggtcttgctccaggcgtataaaaatggagatgtcagcgcgttgctacttgaattgtgcggaggaagtatgtttgatctgcttcgggacgcatatctgattccaaagaaatttcatggaaaatcaggagagaatccggttctcctgactgatgtagagggaaagcttctggagagtaagaaaagggaagtaacagctcgtgaatatgaaaagttccatgagacgtacaggcaacatcaatgtgcaccgagatcaaaactgtatcttgctgacggatatgacatagttcgttcctatacagagggcatgcagattcaggagaaaaaagagaacaagaagcgtggcgtgatggcgttatatgcattaccggataccagaaagcttggactgacagaagcacaggcctatgcagttgtctgggatactttccagaagattcagaaacaggctccgagagtggaagtttattatgggcaggataccggtgagaagcgtcagaaaggatttgacgagataggagttttacttccaattcatggatttgagaaacgaatgcttcatcatctggatgagattgatgggattgttctttcatgcagagagaagatgatgaaaaaggccggagcggaaagccttgacctggaataaagaggaagtgaatgagatgcagacacagaaaataagaaaaaatcatatggatattctctggcatgaatacacagataaaggtggagaagaaataccggtaacacaagcaagtttgacggagaaagcatcaattgtcggaagagtggggattatgcttctctcctgtggaaccggagcttggagagtgagaagttctatgaacgcactagcagaagagatggggataacgtgtacagcggatattggtctgatgtcgattgagtatacctgttttgatggtgatgatggattcacgcagtctttgtgtctgacgaatacaggcgtgaatacatctaagttaaacagactggaacactttatccgtgagttcgaacagggcggacaggatatgtctggtgaacaactgcataagctgctggatcagattgaagagattcacggactatattctccaattgcattgggaatggcagcagcattggcatgcggtggatttacatttctgcttggcggtggattgattgaaatgttctgtgcatttgtcggtgcagggattggaaattttatcaggtgcaaattgagtaaacatcatttcacattatttttgtgtatagcctcatctgtttcggcagcctgtctggtttatgcgggactcttgaaagcagctgagattttgtgggcgattccaatccagcatgaggcgggatatatttgtgcaatgctatttattattccaggtttcccttttatcacaagtggaattgaccttgcaaaattggacatgcgttctggcatggaacgactcatgtatgcactgattattgttttggtagctacaatgtctgcatggatcatggcactagtcttaaatttacaacctgtggatttcctgaaacttgatctgacgcaggaagaatggattattttccggttacttgcaagcttttgtggtgtgtttggattctcgattatgttcaacagtcctacacgccttgcggcagtggcggcaggaatcggtgctattgccaatacattgcgattggaactggttgatctgacggcattgcctccggcggcagcagcatttgtcggagcattaacagccggactcctagcaactatgattaaaaatcgggtcggatatccgagaatctctgtcacggttccgtcgattgtaatcatggttccgggattgtatctgtaccgtggattttataatctgggaacaatgaatctttctacatcagcttcctggtttgcggcggcaatactgatcgttgcagctcttccgttagggttgatctttgcaagaattcttacggataagacatttcggtattgcacgtaaggataatatatacaaaaaaggaacagctctttgtgagctattccttttttgtataaaatagaaaggaatttatttctttttatcttttttcttgtctttgtctttcttctttccggaagatttctcgttgtccttatccttctcgctatccttcgcttttgcagagaatttcttatctgcttcagcttccggctgatatccgttgatatcatatttcttttcatattcctcaaaggctgtaagataagtttcatccttcagcttgcggacactctttgtatattcatgaatatcaaagttagaagaatcaagctcgagaatcgctacagcaacgttagaacagtgcgctgcgatacgctcgtagtttgtaagcaggtcgttaaaagcaaatccggtattcagattacactgaccatttctaagtctcttaatgtggcgaagtttcagatcattacagagaataccaatcagttcgcgcagaggttcaacctttgcagcagtctcaagatcttcatctacaaaagaatttactgtaagatcaacaatctcaaccaatgcattctcaagcacattcagctcataagtagcagattcagagaaggtgcgggacttttcatgaagttcctgggcaactctggaaatgttgactgcgtggtcaccaagtcgctcgaagtcactgatcgtatgaaggaacttggaggtctgtttcgcctgctcaggtgtcatatcatgcatacttaactgcatcagataagtaccaagtttatcctcgtacttgtcgatcatgttttccttttcctggatcttattgaacttgctgtcgctaaagtctgtcagaagttcgaaagcgcgcatgagattcttgcgggcattcttcgccataccgttaacagccatctgactctgactgatcgccaacggcgggtaatccagaaaacgttcctcaagcagatcaaaatcagcctgctcttcgttgtcctcgtctgtatccttgatcaggaagaagacaagcttctcaatcttgctgataaatggggcaagaatcaggatcgtagcgatacggaataccgagttcaataaagcaatgttgacaggactcatgaccatgtccataaatgtaaagtggacagcagcatttactgagtaaaatacgatagaccaaaagatcattccgaataagtcattcagcaggtaaataagtgctgtacgctttccgttcttgttcgtaccgatagaagaaagcagtacaggacaggcagctccgacaccgatacccattgtaataggcagtgcggcagcaaatgtaatagagcctgtgattgataatgcctgaaggataccgacagaagcagatgcactctgaagcactgcagtaaatgcgataccaacaaggatacccataaatggattcttaaacattgtcagaaggctgacaaaatgtgggttctctttcagaggtgaaactgcaccactcattgtctgcattccgaacatcaggatcgcaaaaccaagcataatgtcaccgatatcggaataaggtttcttctttacgaatgtacggaagatgataccgatgatcgcaacgatcgcagagattgttgcggtggacagaagctgcgcaatgccactggagccatcaatgtaagaaagacataaaatccagcctgtgatacttgttccaatgttggcacccataatgattccgattgcctgagcaactttcatcataccggagtttacgaatcctacgaccataacagttgtagctgatgacgactgaatgatcgctgttacgactgtacccagcagcaatcctttgattggggagtttgtgagcttgtataagataagttccagtttgttaccggcaaccttcttaagactgtctcccatgagtgccattccgtacaggaagagggcaactccgctgagcaaggacaaaaccattgtaattcccattttcttttttcctttttcttaagttattaagttgacatgttacgtcttgcaaaaaattacgtacatggctattataaaacactttacctggagtttacaattattttctttaaactttacagaaaaatattgattgcaaattgcagaaaaattgtagggataaacaaaatattaatcttaagcaaaaaagtccttgacttgtccatggataatttccatcagatgagttctcgcttccacgctcgcccaggcaatgtgtggtgtgatcagcaggcgtttactgtctttgatcttgagcaatggattatctgcggacattggttcctcacaaaggacatctaatcctgctgcggcaatctgatttctgaccagtgcattatataatgcctgctcatcgacgattggtcctcttccgagattcagaaaaatacaggaagatttcattttttcaaacgctttgctgttgatcagtccttctgtatgctcgttgagtggagcgtggacggaaataatatcagattgcgtaagcaatgtctcaaagtcaacctgttcataaccttcctgcaccggagcaccggaggcggagtagtaaatgactttcgctccaaatgcacgtgcaatctcagcaacacgtctgccgattgccccaagaccgatgatcccccaggtttttccatggatttctgtgaaatgttctgcaaaatgagtgaaagagacatcatttacatagcgctcttctttcacataatcatcataatagcgcagcttttctaatagaaagagaagcattgcaaatgtgtgttgtgcgacagtctctgtagagtagccggcaacatttctccaggcaattccttttgaatcaagatattccttatccaggttgttcgtgcctgtggctgtgacacagaccagcttcagattctttgcagttccaatagtctgctcattaaccggaactttatttaatatgatcacatcggcatctgtgacacgcgccgggacttcttcaggtgaagaaaagctgtactttacaacttcaccgagttcatcatatgcagaaagatcaatatcctctccaattgttttgacatctaaaaatacaattttcatttaaaatctccttgtttcataatcagtattaagtattttatgatgtgagtgtcaaaagtaaattttgccactcactgatgtaaccggatttctccattgctatgcattcccgcacttacatcattttatcacaaaaagaacataatttcctatattttaccacatactaatcaaaaattgattatggaggttgttaacagttaaatataaattataaagtcatataagccggtgttgagctttataagatattagagtagaatattattgaaaggagttgatactttgagtaaatattattctatacatgaattttcaaaaattataggcgtatctgctcagacgttacgaaattgggatgccaatggaaaacttcatccgcatcatactacagtaagtggctatagatattattccgatgagcaactcaaccaagtaataaatgtaaagcctaaaaatcgcattacaattggatattgtcgcgtttccagccgtaaacaaaaagatgatttggaacgacagattgataatgtcaagacatatcttctagcaaaagggcagccgtttgagataataagtgatatcggttctgggattgattataagaaaaaagggcttcaggaattgatcagacgaatctctcaaaatcaggttgaaaaggttgttgttttatataaagacaggctattgagctttggttttgagttgatagaatatatcgcttcactttataattgtgagattgagattattgataatactgaaaaatctgaacagcaggaacttgttgaagatctggttcaaataatcacagtattcagttgcaaattacaaggaaaacgagcgaataaagctaagaaacttatccgggaattgatacaggaggaaacagatggtaagagccataaaagtaatgttgataccaaacaacgtacagaaaactaagatgtttcagtacgcaggagcttcaagatttgcttataactgggctttggccagggaaaaagaaaactacgaaaagggtggcaagttcatttcagattcagaactcagaaaagaatttacaaagcttagacattctgatgaatacgcatggttattaaatatttcaaataatgtaaccaaacaggcaatcaaagatgcctgtactgcgtataagaactttttcaagggtttgcaaaaattcccaagattcaagtccaaaaagagatcaatgccgaagttctatcaggacaacgttaagatacaattcagtaatacccacgttaagcttgaaggtttttcttccagcaggaaagcaaataagcaaaaaaagaattgggtaagacttgcagaacatggacgtattccaacagatgttaaatatatgaatccgagaatatcctttgatggattgaactggtggatcagtgtatgtgtagaatttcctgactgcaaggaaacacttaacgatgatggagttggcatagacttaggaattaaagacttagctgtctgctctgatgccgttaagtataagaacatcaataagagtcagaaagtaaagaaactagaaaaacagaaacgtagattacagcgtagtatctctcgttcttacgagaaaaataagaaaggggaaagttactgtaaaacaaataatgtaatcaaaaaggaaaaacttttattaaaacgaaatcacagattaacaaacatccgtaaaaactatttgaatcagaccatatctgagatcgtaaatcgaaagccaagatttatttgtattgaagatctgaatgtcagcggaatgatgaaaaatagacatttatccaaagcagtacaggaacaaggattttttaggtttagacaacagcttgaatacaaatgcaatgataaagggatccagcttattgtggctgatcggttttatccatcatcaaagctttgcagctgctgtggaaacatcaaaaaagatttgaagttatctgacagggtttatagatgtgaatgtgggaatatgattgacagagatttccaggcatctataaatctcaaggcttatggagaacgatttgcaagctaacactgaaacgttaatgcaaatatgtacggatacgttagtccggaatttacgcctatggagagtacaagaacttgtgagtagatagatatttatatcatcaaaagcatactcgttgaagtaggaatgaaacatggaagtttataactttttataagttttcagtaacggaaatgtgccatgaaagccacagggatagtccggaggatagatgatcttggaagaatcgtaattccgaaagaaataagaaggacattgcggatccgagaaggtgatccactggaaatttttacagacagagaaggaaaggtcattttaaagaaatattctccaatcggtgaattaggaacactggcagggatttatgcagatagtctttcgaagacacttgattgtacagtctgtattactgacacggatcaggtgatcgcggcagcaggaaacgggaagaaagaacttcaggaaatgttgttgagtgcagagctggcagaagtgtttcaagaaagaaagaccgtgttgaaaaagagcagtgacgctgagtttgtagcaattacaaaaggcaggagtgaatacagcgaggaaataatcagtgtgattctcagtgaaggtgatattgcaggtggagtaatctttctgcagaaaaatgagaaaaagcattttggagaaatggaaaagaagtttgcggcaggcgcagcagatctgcttgggaggcagttaagttaaaagtgtcatatttttccgggaggatgcatagaatagtatcagtggaaaaccggacatgcatcgaaaggaaaagaaaatgagagaaaatcatgggaaaaaagggataatatacgcagaaaatttagtgaaggcattactttgcgcctatctggtcacaggaatgtttctgttaattcttgcacttctcctttataaagcaggattgagtgaagaaaatgtaaatctgggaattattctcatttatgtaataggaactttttccggtggttttgtgatgggaaaactggaaggccaaaagaagttcctctgggggcttggaaccggtgtggtttattttgttctattactgctcatctcatttggaatgtaccgtgaggtttcgtcagggacaggcgatttgtttctgacatttgtactttgtaccggaggtggaatgcttggtgggatggtcgcatgaagaaaaaccagacagatgtgtgaaaaaatactttaaaaacctggctgtgtgtgctataatagcgaaagcaatatgtgcgaagttaggaggagtaaaaatgaaacacattaaaacactgaatacacagacactgaacaacacagttaaaaaaggtggatgcggagagtgtcagacatcttgccagtctgcatgtaagacatcctgtacagtaggaaaccagacttgcgaaaacgcaaaataagaaaacctgaaagtgaagataatgttgctgcaaagttgctttgagcggtgatactgcctgcaattatgcgaaaaacagcaacaggattacaggtgaggcagcggtgcaaatcgctgccttaagcatgttttagacgtatctgcttagagctgcattgtgaaaatgccgggctttgaacagttacaaatagatttacaaatacatatagaaagcgaggtatccacgtgatacatcagtaccagaacaatggatataatatcgtcctcgacgtgaacagcggagctgtacatgttgtggatcaggaagcgtatgatgtcatcgaagtgcttaatcgcatgaatgaagatcatacagtggagacattgaaatctccggaaacagcagaagcattgaaaaaagagcttggagagaaatattctgagaaagatctgctggatattttagaggcagtaacagaactgacggaacagggacgtctgtttacaaaagacatttatgagagctttatcgacgttgtaaagcagcgtaagacagttgttaaggctttatgtcttcatattgcacatgactgtaaccttgcctgtaagtactgctttgcggaagagggcgaatatcacggccgcagagctttgatgtcttacgaggttggtaagaaagcacttgatttcctgatcgcgaattcaggaacaagaagaaaccttgaggttgacttcttcggtggtgagccactgatgaactggcaggttgtcaaagacctggttgcttacggaagagagcaggaaaaacttcatgacaagcatttccgtttcacacttacaacaaacggagttcttttgaacgatgaagttcaggagttcgtgaacaaagagatggacaacgttgtcatcagtcttgacggaagaaaagaagtgaatgaccagatgcgcccgttccgtaacggaaaaggaagctatgatctgatcgttccgaagttccagaagctggcagagagccgtaatcaggagaagtactacatcagaggtacatttacaagaaataacctggatttttccaaggatgtagaacatttcgcagatcttggattcaagcagatgtcaatcgagcctgtagtaggtgatgacacagaaccatatgcaatccagaaagaagatcttccacagatctttgaagaatatgataaactcgcaaaattcctgatcgagcgtgagaagagcggaagaggattcaatttcttccacttcatgatcgatcttgaaggaggaccgtgcgtgtccaagcgtctgtccggctgtggttcaggtacagagtatctggcagtgacaccttggggagatttctacccatgtcatcagtttgtaggacaggaagaattcctcatgggaaatgtcgatgagggaattacaaaaccggagattgcggaagaattccgtggatgcagcgtatattccaaggaaagctgcagaacctgctttgccagattctactgcagtggtggctgtatggcgaattcttacaagttccacaatacgatccatgatacttacgaagtgagctgtgagatggagagaaaacgtgtggaatgtgcgatcatgataaaggctgccctggcggatgaagaacaataaagttagagagcagtagtcaagaaaggaaagaaagagatgaagaaaggtaagagtattctcagcctcattctcgtaatcgcagttacagcactcttcggtatgacctgtgtgcttggacttgatttaaagggaatgggagctgcgaagaacatcaatctcggtcttgacctggaaggcggagtcagcattacatatcaggtaaaaggtgacaagccatctcaggcagacatggatgacaccgtgtacaagcttcagaaacgtgtggagcagtacagcacagaggcacaggcttatcaggttggagacaaccgtatcagtatcgagattccgggtgtgagcgacgcaaacaagatcctggaagagcttggacagccgggttcactgtactttatcaagcataaagacagtgagggaaatgaaaactattccctgacagcttccggatatacactgaataagtcaatcgacgaactgaaagatacagactccatcgtactgacaggtacagaggtaaagacagcttcagccggagtgctcaacgactcaacaacaggaaataaaaagtatggtgttgatcttgagttgacagatgagggtgctgagaagttcaagacagcaacagaagaagcttataacaataaccatgacacaatcgctatttactatgatggttctctgatcagcgtgccaagcgtaaatgcagtgattgagaatggaaaagctcagatttcaggaaacatggattatgaagaggctgataacatcgcttctacaatccgtatcggtggactgaatctggaacttgaagagcttagctcagaagttgtaggagcacagcttggacaggacgctcttaaaggaagtctgatcgcaggtatcatcggtctggcaatcgtatgtgtattcatgtgctgggtatacctccttccgggacttgcatccagccttgcactgatcctttacacagaattgatcctgatccttctgaatgcatttgacattacactgacacttccgggtatcgcaggtatcatcctcggtatcggtatggcggtagatgcgaacgttatcatcttcgcccgtgtgaaagaagagctgacagcaggaaagagcgtacacgcttcactgaaatcaggattccagaaggcaatgtccgcaatcgttgacggaaatatcacaacactgatcgcagccggcgtgctgtggcttcgcggaagcggtactgtaaagggattcgcccagacacttgcacttggtatcgtcgtatccatgtttacagcacttgtgatcacaagactgattatctttgcattctatggagcaggcatccgcaatgagaaagcatacggaagacatctgaaagaacgtaaaccggttgacttccttggaaagaaaaagattttcttcattgtttccatcatcctttgcctggccggaccggtcatgatgggcgtgaaccatgcaagaggaatcggcgcaatgaattacagccttgatttcgtaggtggtacttcaacaaatgtaacatttgataaagaatatacactggaagagatcgacagccagatgatcccaagcctggaagagatcacaggagataagaatattcaggttcagacagtaaaagacagcaatcaggtagtcttcaagacacagacacttgatcttgagaaacgtgaagcacttgcttcttatctgaatgagaactacggggtagagacatctgatatcgctacagagaatatcagctcaacagtaagttccgagatgagaagagatgctgttatagctgtgatcattgctacaatctgtatgctgctttacatctggttccgtttcaaagatattcgtttcgcaacaagtgctgttatcgcactgatgcatgacgtacttgtagttcttggattctatgtaatcgcaagagtatctgtcggaaatacatttattgcatgtatgctgacgattgtcggatattctatcaacggtacgatcgttatctttgatcgtatccgtgaggcgctggcaacaaagagccgtacagaagatctgaaagatcttgtaaaccgctgtattactcagacactgacaagaacgatctatacaaactttacaacatttgtcatggtcgttgctctgtatatccttggtgtaagctccattaaggaattcgctgcacctctgatggtaggtatcatctgcggtggatatacatccgtatgtatcacaggtgcactgtggtatgtgatgaagacaagacttggtgaggaagcgaaggctgcgagagcagcttccggcacaaagacagtttctgtaaaagcagcagacaagaaagaaggaactacttccacagagagtaacgcagcagatacatctgcagacgacagctccaagaagaaaaaaggaaagaagacttctttcaagaacaaaaagagcaaaaaacgctaagaaataaatagcagcctggaaacagtaacgaaatagaatctgctgtatcgaaaatgaaaaatgattttcgatacggcagatttttgttataataaaaaaatatgatactgacagacggggagggtatttggatggagaaatggttcgtcgcaatgaaaaaggcggattttaatggaatagcagagaaatatcagatttccccgatcattgcacgactgatgagaaaccgtgatgtgatcggagatgaagcaattgatttttatctgaatggaacggtggaggatctgtatgacggcttactgatgaaagatatggatcgtgcggtagatattcttaaggagaaaatagaagaaggaaagaaaatccgtgtgatcggtgattatgatattgatggagtcaatgcaacgtatattttgcaacaggggcttgcaggacttggggcagatgtggatacggatattccagacaggatcaaagacggatatggattgaatcagatgctgatcgaccgtgcactggaggatgatgtagacacgatcatcacctgtgataatggaattgcggcaatgaacgagattgcttacggaaaagaaaatgggatgacgatcgttgtgacagatcaccatgaagttccgtatctggaagaaaatggggagaaaaaatatcttctgccaccggcggatgcagtggtcgatccgcacagagcagactgtgagtatccatttaaagggctgtgcggcgcagctgtagcgtataagctggttgaggttttgtacagagtgtctggaaagtcagagcaggaggtagagcatctgcaggaaagactgatggaaaatgttgcgattgccacgatcggtgatgtgatggatctggttggagagaatcgtgtctttgtgaaaaagggacttgagcttctgaagacaacgaagaatgaagggcttcacgcattgatgcaatgtacaggggtagatacagcgaacttgaatacttatcatatcggatttgtgatcggaccgtgcatcaatgccggtggaagactggatacagccaagcgtgcactggaactccttaatgcatcgaaccggagagaggcagtgacattggcagcagatctgaaagaattaaatgacagccggaaagaaatgaccgaagaaggtgtagaagaagctgtccggcagattgaatcaagttcctggaaggacgaccaggtgctggtcgtgtatcttccagagtgtcacgaaagtatcgccggaattattgcggggaggatcaaagagcgttattatcgtccgacctttgtactgacaaagggagagacaggagtgaaaggttccggacggtcgatcgaagcctatgatatgtttgcggaaatgagccgctgcagggaattatttacgaagttcggaggacataagctggcagcaggactttctttagaagaggaaaatgtcgaagttttccggaaacggatcaatgaactggcggatctgacagaagaggatctgcagatgaaggtgtcaatcgatatgcggcttccatttccatatattaatgaagagctgatccatgagcttaagatattggagccctttggaaaagggaacgggaaaccgctgtttgcagaaagtaaactgcgtgtgatccagccaagaatcttcggaaagaaccggaatgtgctgaaatgcagactggaggaccagcagggaaatcagatggaagcggtttatttcggagaagtggaagactgtctgcggcagatggaaaagaagcagatcatgtcttttacatactatccatccatcaatgagtacatgggacgaagaacaattcagcttacaattgtcaattatcagtagataatatcgaaaaaaccgtacaaattgcttaaaatgaagaagaatgggaagttcttatttgaaaaagagaaaaatagtgatatactaaatcatattaattgttcagaactaaggcgttttgtgtctaaaatgcatttgtcgaatatgccatactgacgaaatacgaagcattttggaagttggatctgaacagaacacaggatgaatgaagggggaagatgatatggcaggcactcgggaatatgaagatctgaataaaaatctggagatagtggacggacatgcagtaaaagcaccagaggattatcaggatccggaggagttatatcaggccttaatagctcgtgtgcgtaagtatcatccttctgcagatattacgatgatcgagaaggcctatcagataggcaaagaagcgcataagaatcagttccgtaaatccggagagccttatatcatccatccactctgggtggcaatcatacttgcagatctcgagatggacaaagaaacgatcgtggctggaatgcttcatgacgtggtagaagatacgacaatgacactcgatgagatctcagcagagtttggtgaagaggtggcacttcttgtagacggcgttaccaagctgggacagttgaactattcccaggacaagctggaggcccaggcagagaacttaagaaagatgttccttgcgatggcgaaagatatccgtgtcatcattgtaaaactcgcagaccgtctgcataatatgcgtacaatggagtttatgacaccggcgaagtagaaagagaaatcaagagagacgatggatatctacgctccgatcgctcagcgtctcggtatttcaaagatcaagacagaactcgacgacctttctctgaaatattatcagccggaagtttataatcagctggttcatgatctgaatgcacgtaagacagaacgtgaagaatttgtgcagcagatcgttgcagaagtatcaaagcatatgaagaatgctgatattgaagcgaaagtatacggacgtgtaaaacatttcttcagtatttataagaagatggtgaatcagaacaagacacttgaccaggtgtatgacctgttcgctgtccgcattatcgtagattcagtgaaagactgttacgcagcacttggtgtgatccatgagatgtatacgccgattccgggacgtttcaaggattatattgctatgccgaaggcgaatatgtaccagtctctgcatacaacgctgatcggaccttccggacagccgttcgagatccagatccgtacagaagagatgcataagacagcggaatatggtatcgcagcacactggaaatataaagagacaggtggaagcaatacgaaaggactgaacacacaggaagagaagctgaactggctgcgtcagatcctggaatggcagagagacatgtctgataaccgtgagttcttaagtctgctgaaaggtgacctggatctgttccaggaagatgtatactgcttcacaccgaacggggatgtgaagaatcttccaaacggctccacgccggttgacttcgcctatgcgatccacagtgcagtcggcaataagatggttggcgccagagtgaatggcaagcttgtgaacattgattataagattcagaacggagaccgaatcgagatccttacatctcagaattccaagggaccgagccgtgactggctgaatatcgtcaagagcacacaggcaaagagcaagattaattcatggtttaagaaggaatacaaagaagataatattatccgcggaaaggatctgatcagtgcctactgtaagagcaaggggattaatctgccggatatcatcaagccgaagtatcagcagatcgttcagaaaaagtacggattccgtgactgggatgcagtacttgcagcaatcggacatggcggactgaaagaaggtcaggttgtgaaccgcctgctggaagagtacgagaaagagcataagaaagagatcacggatgagaatattttggagaagatctcagaagcgaataaacagagagtacacattgccaagtcaaagagcggaatcgtagttaagggaatcaatgatatggcagtacgcttctcaaagtgctgtaatccggtgccgggagatgagattgtcggttttgtaacaagagggcgcggaatgtcgatccacagaacagattgtatcaatatcatcaatctttctgatgtggagagatcccgtctgatcacagcagaatgggaggataatgatcttgaagaaggcggtcagtatcttgcagaactgaagatatttgcagacgacagaagaggacttctgctggatgtatcaaaggtatttactgaagagaagattgacgtgaagtccatgaatacccggacgagcaagaggggtacggcgacaatggagatgggatttgttgtacacggaagagaagaattgaatcgtgtgatcggaaagctcagacagattgaaaatgtaattgatattgagagaacaacaggctgatggaggaaaacgaatgaaggttgaaagtattgtactggggtcaattggaacgaattgctatattgtaaccaatgaagagacgaaggaatgttttgcagtggatatggcagaatgtccgcaggaatatgtcaattatatcaagaacaatggactagaaatgaaagcattgtttctgacacatggacattttgaccacatcatgggaatcgatgatttcctcaaagcctttccagtgccggtttacgcaggcgaagatgaacttccggtgatcgaggatgaccgcctgaatgtttcttgtatgtacggaccgaaatacgcattccacggagcacagcctgtaagagacggtcaggtgatcgaatgcgcaggaattgaagttgatgtacttcatacacctggacatacagtaggaggatgctgttattacctaccaaaagaacatagattgttctgtggagatacgctgttctgtgcttccatcggaagaacagacctaccgacaggaagcagcagccagctggtccgctctgtgcaggagaagattatgacacttccggatgatacaaagatctatccgggacatatggaagagacatcagttcagtttgagaaggagcataatccattcatatgataaagatagaaagtaagaagaacaaatttacttataacgtataccatgtcacaaaagcattttatccaaaagaggatatcgtgcagacagtagatgagaagcaagaaccactggtgaagatacatttgccggaagggacttgcttttcccttgcaccggaagaatgcgtgcagacagaagatgtgcaggaagagaaacgcgatgtaacgaagaaagtctatcagtttctctcaaagcagacaggacaggaacttgcctggggaatgctgaccggagtccgtccgacaaagcttgtaatgcagaaaatcgagcagggaatgacaaaagaagaaatctttgaatttctaaaagaacaatattgtgttggcgataaaaaagcacagattgcgtatgagattgcatgccgtgaaaaggcacttcttgatcagttggactgtaaaaatggctatagcctgtatgcaggaattccattctgtccaagcatctgctcctactgctcattcagctcttcaccaatcgctgagtggaaagatcaggtcgatcgttaccttgatgcgatgatcaaagaattgaaaactacagcaaagctgatgcagggaaaaccactcgatactgtatacatcggtggaggaacaccgacaacactcgaggcagaccagcttgaccgtttgcttggaacaatccgggagaattttgacctggaacatgtgcttgagtttacagttgaagccggaagaccggacagtattacacgaaaaaaacttgaagtgatccgcaaatatcctgtaacccgaatctctgtcaacccacagacaatgcagcagaagacactggatcttgtcggaagaaaacatacggtagaagatgtagaacaaatcttccacctcgcacgtgagcttggattcgataatattaatatggatctgatcgccggacttccgggagaagatgcagcagatatgcaggatacacttgagaagatcgagaagcttcatccggacagcctgacagtacacgcactcgcaatcaaacgtgcggcgaagttcggtcaggaaggaagaacaatggacccggggactgagatcacacagatggtcgaggcggcagcagcgtcagcagaacgcatggggcttgtgccatattacctgtatcgccagaagaacattgccggaaacttcgagaatgttggatatgcagagcaggacaaggctggggtgtataacattttgatcatggaagaacgccagacaattattgcctgcggtgccggctctacgacaaagcttgttttgccggagaagatcaagacaagcagtggcaaagaaacaaatctgatccgtgtagaaaatgtgaagaatattacagagtatattgaccgtatcgatgagatgatagaacgaaaaaaagcactttttgagaaggattaaaagtgaaaatatagctgaaaaaagtaacaaaaggacggttccaccgggaggtggaccgtcctttcgttgtattctagttgatgaacaggaaagatttcaagccccctcctaaccatcgatctcagctttctttttccgcttcatctcagaaaccttcggtattgactgctgtgtaatgtttggaagttttaatcccgttatgctctttaagatccatacaaaagtcagcattacaagaactgggattgcgcaggttgtcacaatcattacagccacgccttctaaaatcttgttcaagcccttttcaatagcatcgattttttctgaggcagctgtgccgacggtatcgacagcatcacttaccttgtcttttaagttgttgataaagtcggtgatagaagaaggtgtattattgttttcaatatcatttgttttgttactgttggcagcagaggcagagtcattatctttatccaataatttttcagtatcatctaatgtaaaatccatatcgtaggattttgcataagtttcgttcaccttattcgtcatccagacgctggtaggaaccagtccccagagaaggattccaagaatgatacttttgatcccgattctgtaaatgaattccttccatccggctttcataaaattaccggttgccatcagaatacatccgataggaaataagattttaaaggcaatgtatcctgtgatggtcagtaaatatttctcaataatgatcacagcataaacgatcaccatataacctgcaacatcagcaagcttattcgcaataggagttgttgcatctcctggtattgcagctgctccggctgcaagtgctgttgcagtacctgtaagctctaaagcctttttctgcaattcattcaaagtattaataatcctgctgtatgtatcagcggaagttgcccagtttgagattgcaaaaaaagagattaatgcaattgcaatgcatataagactataaattaaatgcttttgcatggattttttgtcatttttaatcgcgacatctgtacagtttgtatttctgtcattattcatgtcttttgtttcctttcataaaatttagctgtttttaaatacgcaataaattaacgtagattcagattttttaatccaaataaagtatatcatctcgaaaaaggtaattcaattagaacaaaaataaacagaatcaaaagtagttgacatttcgtattacgaaagtataatagtataggtgagagaaaggagaaggcctatggctaagatgggacgtccgaagtcagacgtgatcaaagataaaattgtgacaatccgaatgtctgcggaggaacatcagaaacttagggactattctgagaagcatcaacagacgataacggaaacccttaaagaaggagttgacttattatataagactcgtgattaaggtatatttttagttgaagaacattacgaaatcaagagattatagtaatgaaaagatagaacgaaaaggagaagtgctatggcattaaagaaaaaaccggtaacaggaatgaaagatattcttcctgcagagatggagatcagagattatgtgatcggtctgatcaaagagacatatagaagctttggattctcatccattgagactccatgtgtagagcatatcgagaacctgtgcagtaagcagggtggagataatgagaagctgatcttcaagatcttaaagcgtggagagaagctgaaacttgcagaggcgaaagaagaagctgatcttgtagacggaggactccgctatgacctgacacttccgctgtccagatattatgcaaatcattctaatgagcttccggcaccgtttaaagcactccagatgggaagtgtatggcgtgcggatcgtccacagagaggacgttaccgccagtttatgcagtgtgatattgacattcttggcgagccgtctaaccttgctgagatcgagctgatccttgctactacatccctgcttggaaaactggatttcaataactttacaatccgtatcaatgaccgccgtttcctgaaggcaatggcagcttacagtggatttgaagagaaggattatgacagcgtatttatcacactggataagatggacaagattggtcttgatggtgttgcagcagagttgaaggaaaatggatatgcagaggaatctgttgagaaatatcttcagctcttcaaggagatcacaggagacgtagaaggtgtccgtgcatgtaaagagaaacttcagggattccttccggaagatgcagcggattctcttgaaatgatcattacaagtgtagagagtgcgaaggaagcagatttccgtatgctgtttgatccgacactggtacgtggaatgtcttattatacaggaactatttttgagatttctatggatgagttcggcggatctgtaggtggcggcggacgctacgacaagatgatcggtaagtttacaggacaggatacaccggcagttggattctctatcggatttgaacgtattgtcatgcttctgatggagcgtggatacaaagttccgacaagcaaagagaagaaggcgttcttgatcgagaagaatatgccgaaggaaggtatgctcaaggttcttgatcttgcgaagaaggagcgtgcagcgggacgtcaggtaatgatcatgaacatgaagaagaacaagaagttccagaaggagcagcttgcagaacagggatacacagatattacagagtgctacagagattctgttgataacatataggaaaaaaggaaaggaagtaaataaccatggctgaatcaatgcaggggcttaagagaacacaccgttgtggtgaactctcagcagccaatgtcggggaaactgtaactatcatgggatgggtacagaagaacagaaataaaggaggacttgtatttacagacgtaagagatcgttctggaattatacaggttgtatgtgaagaaggaactacagatgcagcgatcattgagaaagcagcatctttacgtgcagagtatgtagttgctgttgttggaaaagttgagaaacgttccggtgcagtgaatgataagattgcaacaggtgagatcgaggtgatccctagcgaacttcgtgtactttctgagtcacagacacctccgttcccgattgaagaaaactcaaagacaaaagaagatatccgtctgaaatatcgttaccttgaccttagaagaccggatctgcagagaaatcttcgtatgaagagtcaggttatgacactgacacgtcagttcttctcagatgaaggattccttgaagtagagactccaatgcttggaaagacaactccggaaggcgcgagagattatcttgtaccaagccgtattcatccgggatctttctacggacttccacagtctccgcagctttataaacagcttctgatgtgttcaggcgtagaccgttacatccagattgcaagatgtttccgtgatgaggatcttcgtgcggacagacagccggaatttacacagatcgatatggagctttcttttgttgacgtagatgatgttatcgaagtaaatgaaaagtatcttaagaaactttttaaagaagttcttgatgtagacgtacagcttccaatccagagaatgacatggcaggaagcaatgaaccgttatggttctgacaagccggatcttcgtttcggaatggaactgaaagatgtatctgatgtagtgaaagactgcggatttgcagtatttacaggcgcacttgagaatggcggaagcgttcgtggtatcaatgccaaaggacagggcagcatgccgagaaagaagatcgacaagctgacagcatttgttaaggattacggtgctaagggtctggtttatgttgcactccaggaagatggaacagtgaagtcttcatttgcaaaattcatgacagacgagcagatggatgcacttgtaaaggcaatggatggagagccgggagatctgcttctctttgcagctgacaagaataaagtagtatgggattctcttggagcactccgtgttgaacttgcaaaacagcttgaacttctcgataagaatgagtatcgttttgtatggatcacagagttcccgttgcttgagtggagcgaggagcagaatcgtttcgttgcgatgcaccacccatttacaatgccgatggaagaagatatccagtatatcgagtctgatccgggaagagttcgtgcgaaagcatacgatatcgttctgaacggaaatgagattggtggcggtagtgtcagaatcttccaggatgatatccaggaaatgatgttcaaggcacttggctttacaaaagagcaggcttacagccagttcggattccttctggatgcatttaaatacggagttccgccgcacgcaggacttgcttacggtcttgaccgtcttgttatgcttatggcaaaacaggacagcatccgtgacgtgatcgcattcccgaagatcaaagatgcatcctgtctgatgacagaggctccgacaccggcttctgagaagcagctggaagagcttagccttgctgtgaaggcacaggaagaaacagttgaagaataaatagtgatatttcagcaggaaaacagtaaacagagttttcctgctgtttttctacacgttctcgcagtgatttttctgacaatatcaaaagaaatttaaaatataataaaatttctcttgacaaatagaaagtgaacgactacaataagacacatcaaaagcaaaaaccgatgagaaagagaagtaggttttagaagagatcacagagagcagcaggtggtgggattgctgtatggattctgattctgaatggactttcgagggcggcctgaaatgaaaagagtaggaaccgccgggaaccgaacccgttatcaatcaggagcgtatgttagtacgtgagaaagtggacgaacgtcaatttgagtggtaccgcgataataatgaattttattaccgtctcaagcaataagcttgaggcggtttttatatgttaggaaagttaatttataaaaagaaatccacagcttattgacaagaatcccaaatcggctcctttgcttttgcagaatttatttaaaaagaaaaaggagacaacaattatgaaaaagagagtattagcagttattttaggagcagtaatgacaatgagccttgcagcatgtggatcatctgatgcaggaaagacatcttccaacgacagcgagaagagctacacaatcggtatttcacagtttgcagagcatggttctcttgataattgccgtgagggatttttagaaggactgaaagaagaaggaatcgaggaaggcaagaacctgacagtagaagtgaagaatgcggcagcagatcagggaacagcaaaacagatcagtgatggatttgtttcagacaaagtggatcttgtgtgtgcaatcgcaacaccgagtgcgcaggctgcttataattcagcaatgaactccgacattccggttatatacacagcagttacagacccggttgcagcaaagcttgcgaaagaggatggaacacctgcaggaaatgtaacaggaacaagtgatgaacttccgatcaaagcacagcttgagatgatccgtgagatgcttccggatgcgaagaacatcggaatcctttacacaacaagcgaagcaaactctgtatccgctcttgcaaaatataaagagcttgccggagactatggattcacgatcgttgacaaaggaatcgcacagacagccgatatctctcttgcaacagatgaactgctgacagaggttgactgcttgacaaatcttacagacaacacagtagttgcttcccttgcaacaatccttgataaagcaaacaaacagaacattccggtgttcggaagtgagatcgagcaggtgaaaatcggatgtctggcagcagaaggacttgattatgtggcacttggaaaacagacaggtaagatggcagcagagattctgaaaggtgagaaaaaagcatctgagatgaactttgagacaatcacagaaccaggtttctatgtaaatgaaaaagttgctgaaaaccttggagttacagttccgcaggatcttgcagatgaagcggtagagagctttacagagattacaaaatagtattgaaacagagaggttaacacattatggggatttatattacgattttagaacagggactgatctatggaatcctggcgcttggggtatacatcacttataagatcctggatttcccggatctgacagtagatggaagctttccgctgggagccgcactgacagcgacgatgatcacaagaggcgttcatccaatcctgacactgccggcatcattcctgatcggtgtgcttgccggagtctgcacaggtctgattcatgtaaaattcaaggtaagagatctcttatccggaattatcatgatgacagcactgtggacgatcaacttaagactggcaggaacagcaaatgtcccaatctttggagatgacagtatctttgataatgcatccgtaaatggaatcttccatgatggcctttcaaattacaaagtacttgtgatcgtgcttgtgatcgcagtgatcagtaaagtattattagacctttatatgaagacaaaatcaggttttctgctccgcgcagtaggagataatgacgtattggtcacatctcttgcaaaagatcagggcaatgtgaaaatcttaggacttgcaattgcaaacggacttgttgctctttcgggaagtatcttctgtcaggagcagcgcgtatttgaaatttcaagtggaaccggtgcaatcgtaatcggtttggcaagtgttattatcggaacaagcttatttaaaaatgtatcctttatgaaagcaacaacagcagtgctgatcggatctgtgatctataaagcctgtgttgcagcagcgttgaagttctttgaaccacaggacatgaaactgatcacagcggtattattccttgtgatcctggtgatcggtggagaacgcagaaagaaggtgaagaaaaatgctcgagcttagaaatattgaaaaatactacaatccggggaccatcaatgagatgtgcctgtttgacaaattcaatttgaccgtagacaaaggagaattcgtctctgtagtcggaagtaatggttcgggtaagacttctatgctgaacatcctctgtggaagtattccggtagacggtggacagatcctgatgaacggtgaagatattacaacaaagaaagaattcaagagaaatcagaagattggccgtgtttatcagaatccggcaatgggaacatgcccgacaatgacgattcttgaaaatatgtctcttgcagacaataaaggaaaattctttggtctcagttccggaatcaataaggcgcgtaaagaatattatcgtgagattttaagccagcttggacttggacttgagaataaaatggatgtgaaagtaggatctctttccggcggacagcgtcaggcaatcgcccttctgatgtctacgatgacgccgattgatttcctgatccttgatgagcatacagcggctctggatccgaaaacagcagagctgattatgaaattgacaggaaagatcgtggaagagaaaaagcttacaacgatcatggttacacataatcttcgctacgcggtggaatacggaaatcgcctgctgatgatgcatcagggtggagttgtgatggatctcaaaggaaaagaaaaagaagaacttcaggtagaagatatcttgagcaagttcaatgagatcagtatagagtgtggaaattaaatacttaaaaatacaaagaaaggattgatagctgtcacttagacaactgtcaatccttttttaaagctttttattcgtcccatccttcgtagaatcggatatttacggaaatatttcttacaatctcatcttcagcaagttcaatatcttccagatcagatacatgtgggaagattggatcttcttcttctaattcaacagtgatccatgttcttgcagcttcatttgcattgtcgatcgcgtcgtccaaagtttctccggatgcctcgcagcattcgagatccgggaaatgtgcgtcatagcctccatcttccttcttacggaatatggctggatatataaatttcatttcataattcctcctggtttctaaaacataatctgttacttagtatagttgataaaaaataaaatggcaagaggggaacgttttagatatgaaaaaagcacttaaatctttaaagatctaagtgcttcagagcgacagacggggttcgaacccgcgaccccaaccttggcaaggttgtactctaccaactgagccactgtcgcataggattgttcccaatgaacaatcaatatgaaattaagatgttgagagcgacagacggggttcgaacccgcgaccccaaccttggcaaggttgtactctaccaactgagccactgtcgcataacttattgttccgacgaacaataaatatgttactacaagatcgttaaaatgtcaacagaaaaaataaaaaaaatcagagaaaatgaaaaaaattaagtctaagacttcctagtgaaagaaaatcatgctatactgtggttactgtgactaaacacaacagatgtgaaaagaaggatgttgtaaatctttgttttataataaaagaacaaattacacagaaataagagatgaaagaggtgtccataatgaaaacagtaaaggtagcaattctcggacttggaacagttggatccggtgtctataaactgattcagaagcgtgctgatgtgatggagaagacaatcggcgctcagatggaagtgaagaagatccttgttcgtaatatgaataagaagagagagggtgtagacgcttctcttttaacagataattggaacgatattattgaagatgaggagattcagatcgtaattgaagttatgggcggtatagagccggcgaagacgatgatccttgaggcgctcagagccggtaagaacgtagtttctgcgaataaggacctgatcgcagaggagggacatgtacttcttgcaacagctgaagagaatcatgtggatttcctgtttgaggcagcagttgccggagcaattccgatcattcgtccgatgaagcagtgcctggcagtaaatgacatctctgaagttgtcggtatcgtgaatggtactacaaactacatcttgacaaagatgacagaagaaggaatggatttctcagacgcacttgagaaagcacaggagcttggatttgctgaggctgacccgacatcggatgtagaaggtcttgatgcaggacgtaaggtggcgatcatggcttctatcgcgttccattccagagtcgtatttcctaacgtatttacagaaggaatcacaaagatcacagcgaaagatatcgagtatgcgaaagaatttgacagtgtgatcaagctgcttggcgtagcacataacacagagagtggaattgaagtaggtgtttacccaatgatgatccataaggatcacccgcttgcatctgtaagagattcctttaatgcagtttttgttcatggagatgcagcagatgatgcaatgttctatggacgcggtgcaggagagttcccaacagccagtgcagttatgggagatgtgattgatgttgcgagaaatatggcatatggctgcaatggaagaatcagctgtacatgttataagaaccttccggtaaaagacattggggatgtgaagaataagttctttatccgtatgcaggtgacaaatgaaccaggtgttcttgcagcagttgcagaggtatttggtaatcataaggttagtatcacaagagttgttcaggaacatacacagccacatcaggcagagcttgttattgtaactgagagtgtgaaagagaaatatatgaagcgtgccctggaagagcttctggcactgcctagcattctggaagtgagcagcattatccgtgagtattaatcagaagaagtagaaatcagacagaagcttataggtttatcagatgtgatgtttctatatgaaagaagaatcattggtcaagaaggagagaatagttgagttacgcagataaagtatttattgatatgtgcagagacattatagagaatggaacaagcacagagggtgagaaggttcgcccaagatgggaggacggaacaccggcatataccattaagaaatttggagtggtcaatcgctatgacttgtctaaggaattcccggcactgactcttagaagaaccgggatcaagagctgtgtggatgagatgctctggatctggcagaaaaagtcgaataatattaatgatctaaacagtcatatctgggacagttgggctgatgaggatggttcgatcggaaaagcttatggttatcagatgcaggtgaagcatcagtataaagaaggcatgatggatcaggtagaccgtgtgatttacgatttgaagaataatccgtacagccgtcgtattatgacaaatatttacgtgcatcaggatcttcatgagatgaatctgtatccatgtgcatatagtatgacatttaatgtgacaaaggaaaaagacagtgacaagcttacactgaatggaattcttaaccagcgttctcaggatgtccttgcggcaaataactggaatgtgtgccagtatgcagtattgcttcatatgttggcgcaggtatgtgacatgaaagtgggagagtttgttcatgtaatcgcagatgcacatatttatgaccgacatgttccgatgattgaggaactgatctcaagagaaccgcttccggcaccgaagttctggctgaacccggaagtgaaagacttctatgatttcacaccggatgatgtgaaactggaaggatatgagacacatccgcagattaaaaatataccaatcgctgtgtaaaggagaagaagtatgcaggcaatcgtagcagcagataataattggggaatcggttaccagaacagactgctggtgagcattccatcagatatgaagttctttcgtcagaaaacaacaggaaatgttgtagttatgggacgaaagacactggaaagtttcccaaacggacttcctttgaagaatagagtgaatattgttcttacgaagaataaaaattatcaggtgaaagatgcagtgatcgttcactcagaggaagaacttttagaagaattgaagaagtatccgagtgagaaggtttatgtgatcggtggcgagagcatttacaagatgatgcttccatattgtgatactgtatatgtaacaaagatagaccgtgaattccaggcagacacttatttcccgaatctggatcagatggaagattggaagatgacggaagagggagaagaacagacttgttttgatctagaatttgcttttacaaaatatgagcgttgctaaaacagatgctgtgaaagtgtaaaagcgtaaaagtgagaagatgaatttgaagatgaagaagagaagagtaagagactttctgcttgcaggaagtcttattcttggaatgatgctgaccgggtgtggaatgtccgggcagcagacagagcaaaacgggggaaaagaacagaataaagtagaaaatgaaaagattagtgttgtagcgacaatctttccgcagtatgattttgtgcgtcagatcgcgggagagaatgtggaacttaagatgcttttaaaaccgggtgaggagacacattcttatgagccaacaccacaggatattattgcgatccagaatagtgatctgtttatctatgtgggcggcgagaatgatgcctgggtagaagatattcttgaatcaatgccggacaacgggagaaagactctgaagctggtagactgtgttgatacagtggaagaggaacatgtggaaggaatgaaagaagagcgtggtcatgatcatgacgaggatgatgcggagcacgaagtggagcatgaagaggatgaagcagatcatgaagagcatggacaggaagaaacacattctgtacatgaaattgatgaacatgtgtggacatctccgttaaatgcggtgaagatcgtcgagcagatcaaagaagagctctgcgagattgattcggaaaatgcatctgattatgaagaaaatgcagaagcttatgtagcacaattgaaagaattggatcaggaatttcaggatgtggtggatcattcaaaacgaaagctgatgattttcggagacagatttccgttccgttattttgcagaagcgtatggtctggattattatgcagcattttcaggatgtgcttcggacacagagccaagcgcagctacaatggcgtttttaatcaataaagtacaggatgagaatattaaaacagtattaaaaatggaacttagcaacgaaaatattgcgaaagctattgcagaagcaacaaatgctgatgtaaaagaattttatagctgtcataatctgacagcaaagcagtttgcagatggagagacatatctgagtcttatggagaaaaatgttgaaacattaagggaggtgctgaactgatggcgttgatcaaatgtgaaaatgtatccattggatacgaaggacagatggtcgtacatgacttgaattttgagattaatcagggagactacctctgtattgtcggagaaaatggttccggaaaaagtacacttgtaaagagtcttttggggctgaagaatgtggacaaaggcaagattgtttttgatgatggattaaaacagacagagatcggatatcttccacagcagacagatgtgaagaaagattttccggccagtgtttatgaagtggttctttccggccggttgaacagcagagggatgaaaccgttttatacagcagaagataagaagcaggcgtgggagaagatggacatgcttggaatccgtgatctcgcaaaacaatgtttccgagatctgtcaggtggacaaagacagcgtgttctgcttgcaagagcattgtgtgcgaccaagaaactcttgcttcttgatgaaccggtcacaggattggatccaattgtgacagcagaattctatcaattgatcagtcgaatcaataaggaatccgggattgcagttgttatggtttcacacgatatcgagagtgctgtagaatatgcaagtcatatccttcatttacaggaaacagtgctgtactttggaaaagcagatggatacgagaagagtcgtgccggcaagacattcttaggaggtgagacacatgtttgatacagtgattgagatgttgtcttatccttttatgacaagagcgttccttgttggatcactggttgcattatgttctgcattgctgggcgtcagccttgtattgaaacggtattcgatgattggggatggactttctcatgtgggatttggtgccatggcgattgcggctgcgatgaatgccgctccgcttacagtagcaatcccggttgttattgtagcagcgattctgcttcttcgaatcagcgggaatgcaaagatcaaaggagacgcggcaattgcactgatttctacaacatcactagcagtcggcgtgatggtgatctcattgacaacaggaatgaatacggatgtatataattatatgtttggaagtatccttgcgatgagtgcggaggatgtgaagttaagccttgtactttccgtttttgtactcatcctgtttattgttttttatcacaagatatttgcgattacatttgatgagacatttgcccgtgcaacaggtgtaaaagcaggagtttacaatacgttgatcgctgtacttacagcagtaacgattgtgcttggaatgcgtatgatgggagcattattgatctcgagcctgatcattttcccggcattgacatcaatgagagtgtgcaggacatttaaaagtgtcataataaacgcagcagtgatctcagtggtgtgtttgatcgcgggtgtgaccctttcttatgtggcggcaaccccggcgggagccagtgttgttcttgccaatcttgtaatgatggttctgtatacaatagttggagctgtgaaaaatcatatgcgatagattaaataagatcaagaactcgacgttgacaagatattttttaacacttataattaatttacgctttacgcaaatacgaagacagggagtagtacacagcttgtggatgtacagaggcttatctctgaattcaggtgatgacatggatagatctggctgttgacacaggtactgtgaacggtaaatactggatattcgccctgggcatgaaggtcatgcttggggctttcttttttgaaaagggaggtatatagattgaaacagatttcaggaaacaaattacttgtaagagcgctgaaggaagaaggcgtggataccattttcggctatccgggagcatgtacgattgatatcagtgatgaattgtacaagcaggatgatattcggatcattctgccaagacatgagcaggcactggttcatgaggcggatgcttatgccagaacaacgggtaaggtaggtgtctgtcttgttacaagcggaccgggagctacaaaccttgttacaggtcttgcaacagcgaattatgacagtgtacctctcgtatgttttacaggtcaggtagcaagaccattgatcggaaatgatgcattccaggaggttgatattgtaggaattacacgcagtattacgaaatacggtgttattgtacgaaacagagaggatcttggaagaatcattaaagaagccttttatattgcaagaacaggaagaccgggaccggtactgatcgatctaccaaaagatgtgatggcagaacttggaagtgcggattatccggatacagtcaatatccgtggctataagccaaatacgaatgtgcatatgggacagttaaaacgtgcgcttaagatgctgaaaaaggcaaagaagccgttatttcttgccggaggcggtgtgaatatcgcccgtgcgaatgaagtgtttacagaagttgtagagaagacagaagttccggttgttacaacgatcatgggacgcggtgcggttccgacagatcacccgctttatataggaaaccttggaatgcacggagcatatgcttcgaacatggcagtcagcgaatgcgatcttttattctcgatcggaacacgttttaatgaccgtattacaggtaagctgcatgagtttgcaccgaatgcacagattgttcatattgatatcgatacagcatctatttcaagaaatattcatgttgatgtgccgatcgttgcagatgcgcttgaggcagttacgaagatgaatgaatatgtagagcactgtgagacgaagaagtggagaaagcagattgccgagtggaaggaagaacatcctctaacaatgaagaaccgtgtggatatgggaccgcaggatattattgaagagattaaccgtcagtttgacaatgcgatcattgcaacagatgtaggacagcatcagatgttcacaacacagtatattgagattacaaagaacaagcagctgatcacttccggtggacttggaacgatgggatatggcttcccggctgcaatcggagcgaagcttggtaatccggataaggacgttattgcaatctccggagatggtggtatgcagatgaacattcaggaatttgctacagcagtattggaagaacttccattgattctctgtgtatttaacaatgaatatcttggtatggtacgtcagtggcagaagctgttctatggaaaacgttacagtatgacgaacctgaaatcaggagcacttttccgcagaacaaacgggcaggagatgccggagtacacaccggattttgtgaagcttgcagagagctacggagccaaaggaatccgtgtcatgaagaaagaagatatcgcagctgcatttgaagaggcgaagaagaatacaaagacaccgacactgatcgagttcgttatcaatccggaagaacttgtatatccgatggttcagccgggcggaacacttgaggatttgatcatggattgttaatcgattagaacagaaaatataggttagcgaggaagagatatggataataatatgaaaaagagatggatttctctctatgtagaaaaccaggttggtgtactttcgaagatttccggtttattttccgggaaatgttataacctggacagtctgacagttggaacaacagaagacccgaccgtttccagaatgacaattgcaacagtcagcgatgatgagacatttgagcagatcaagaagcagcttaaccgtatgattgaagtaattaaagtaattgattttacagacgtatttgtaagaatgaaagagatcctttatgtaaaagtcttaaaatgtacaccggaagataaggttgagatctttcagatcgcagagacatttaaggcgaaagtaatcgattacggaaaagacagtcttctggttgagtttgtacagactgcgacaaagaatgatgcagttgtgaagttgatgaaggaagaatttaagagcattgaagttgtccgaggcggaagcgttggaatcgagtcgatcagtatgatggaaagataattaataaaaagaaataaaaaagtatcagaagcaaatttaaaagtttctgatacttttttatttatatgttttttgattttgtatccatttgtgatttgctattacaaacggaataatactgtcgcaatattaaagtaaatcaggattgagaaggtatccaccagtgttgtgatcagtggagatgccatgatcgcagggtcgagatttactttcttggcaagaagtgggagggtacatccaaccagctttgccatgattacggttcccatcagggagcaggcaatcacaactgcaagtcctggattgtgatactgtataaagatacgtacaccgttggcaacagcaagaaaagcaccgacgatcaaagagatacggaattctttgaacatgactttgaaaagatctgtaaaacggatctcatccagtgcgattccacggatgatcagtgttgcactctgggaaccacagtttccaccggtatccatcagcattgggatgaaggatacaagaagagggatggctgcgaatgcattttcatatcttgtaatgatcgttcctgtgatgatggaagtgaacatcaagattaaaagccatgggatacggttctttgcatgctgaagaacggatgtttcaaaatatgtcttctcactagggttgatggcagccatctttgtgatatcctctgtggcctcatctaccataacatccatagcatcgtcgaatgtaacaataccaaccatgcggccgtcctggtcaataacagggagcgcaagcaggtcatactttgtgaacagctgtgcaacctgttcctggtcagcgtgtgtatacacggagatgatctctgtttccatcagatctttgatcggaacattgtcatctgttgtcatcaaatcttttgcacttacgataccgaccagttttctgcgttctgtgatatagcaggtgtaaatggtttctttatggattccggtcttcttgatatgtgccatcgcctgtccgacagtcatttcctcacgcaggtctacatattccgttgtcatgatacttccggcactgtcttccggatagttcagcagctggttgatcatgctacggtctgacgcgctgacggtagccagaattcgctttacaaggtttgccgggagttcttccagcatatcgaccgtatcgtccatatagaggtcgtctaagagctctttcagctctttctcagtaaacattgttactagataagtctgcatggaagtgtccatattggaaaatacttcagcagctttatcttttggaatgagacgaaaagcaagagccagttctttatcacttaaagttgagagaagagaggctatgtccacttcgttcattacatcgagaatacttctgacagctttgaattcgcgctgcgccagaagctttataaaaatatctttgtccatgataattacctcgcattattttatttttgtctattgagccacatatgtggtaactactggcaccagagtccataacctcacctcccttgttcgtatttttatgagaaacaaaaaactccatcattgcctgaacaatgacggagtcgtattgacttcttataaaatgcatcgttcaagctttagtatcacagggcatatcaattgcattaggttgtgccttctcgacacagcctgctgaccaactaatcgtgtctccacaatctcgcggcagcaatctccgggtcctatcgaatgcttgaagcatgtcaaatatcccaatccctgtggtaacctcacctaccgaaatgatgtagttgtgttgtttttaccatagattattgtatcccacgcagcggggcgtgtcaaggaaaaatgcgataaatctgtgtaaattggtgtaaaaagaaagaaaaaagtggaaaaagatgaaaagacaaaaaggatatctgtcagagtaatcattacttctggcagatatcctttttgttttcaatccttgcggatctgatatacaattttcccattcactttttcctcagtgatcattttttgctttaccatatagggaagaattgaatcaagaaattgtcttggattagtcacattgatttgttcctgcataaatggctgtttcgccgtcagatctttcacatatggctcaagagctgtgcgggtcataggaccatttttcttcaatgtctttttgactttggagattcctttggaactgagcatattagcaagatcgcttccctgtctcatcgtacgccacaatccccatccgtagacaatcattgtagcaactgcaaagagcagtacataaggaagatatttcagaatcgtatgcatcatttccgtttctctcctttccagtagatcaggtgattatcatgaaggatctcaaggtatttgatcagtcttgtcaacggctgttccatagaaggaaactctgcttcaagctctttggagattgcatgtacatcctttttatcatcgatggagttccacacaaaagttccaagcttgtctaacttgatttcacttacacggggacgacggaagaagcgctgagccaacttgtgataaaatcccttccattcgataaggacggtaataataccgtcctcacctgtttcatattcaatttccggattcttctccgggataaagtcaagatagtttttactgtctttctttttcattgaattatttttccttatcagctttcatacatacaacgtacagaagtacgagtaatgcaatgtaaagcaccagactgccaacctgtggtaagtggaatggcagaatgatcttagaatcaatcttaactactgcaaatacagcaagaaggataccgatgataccttctccggcgatcataccggatgtaaagagaagacctctgtctgtacgtgcttttttctctgcctctgtaccttttttcttctcaacgaagatacgtacaataccaccagccatgataccagcactcagagagaatggaaggtacataccaactgcgaatggcataaccggcatcttgaggatctcaacaacgattgcaataaatacaccgatcaggatcatagcccatggaagttcctcattcatgataccttcaacgagcatcttcatcattgtagcctgagctgccggaatcttttctgttccgtatccccaagcctcattcagaaggtaaagaacgaatccgattgctgctgaagaagcaacaacaccgatgatctcaccaacctgctgtttggaaggtgtagcacctacgatgaatcctgtctttaagtcctgagaagcatctcctgcgattgctgcaacgatacagatgataccaccgatagaaatggctccaaccatacctgtaagtcctgtagtacctgttactttcaggattactgtagcaaagagaagagtagcgattgtcatacctgataccgggttgttagaagatccgatcagtccaaccatacgagaagatacagttgcaaagaagaatccgaatacaacgatgatcagggcaccaatcaggttaaccgggaagatcggaaggatccagatcagaacagcgatcacaatgataactccgatcagtaatgggaatggaagatcctgctctgtacgaagctgttttccagatccggcattctttttcatacttccaacggcctgcttaaatgttcttacgatcagaggaaggctcttgatcagactgatgataccaccagttgcaacagctcctgctccgatgtatttgatgtagttactccacagagcggacggaccaccacctggcatagtgagcaattcattgactgtaactgatgcagggaagattgtagcatctccaccgaacagtgcgatcattggcataagtacgaaccagctgagtgtaccaccggcgaacatgtagctggagatcttcggtccacagatatatcctacaccaccaagtgccggaagaacctgcataccaatctgtgctccgctgtagttcttgaatgcgtgtccaatctcacttgggaagagctgcgttccgtctgcaaggaatttgtaaacggctgcgataccaagtcctgcgaatactgtaccagccttagatccaccttcttctccggccagaagaacttctgcacaagcagttccctctgggaaaggaagtgttccgtgctcttcaacgataagagcctgacgaagcggtaccatgaagcatactccgagtattccgccaaacagggcaatcagagcgatggaaaggatgcttgggaaagcaatctttccttcttcagcccaaaggaataatgcaggaagtgtgaagatagctcctgctgcaacagactctccggcagaaccgattgtctgtaccatgttgttctcgagaatagaatccttacggagaatcacacgaatgattcccatagaaattacggctgccgggatggaagcggaaactgtcataccaacgagaagtccgaggtatgcgttagcagctccaaatacgattgccagaaggataccaatcaagagtgctgtcaccgtaaactcaggaacgactttgtccgctggaatatacggcttgaattctttcttgttgttgtccattttttcaatgtcctttcttttgttttctatgctatcctgctgtccccacaacagatagcggcgccttttgttaatataaaaaattttttattaacacagctttatgattatagcatattaaagtgctaaaaggaagaataaaacgcaaaaatgttatggaaatatgttgtaaatgtaaaacttttataaaaaatggtagattttggaacaaaaaagagaggggaatgagaaaagatttcaaaattcttgataaaaataggagcttttagaaaaatgataagaaattgagaaatacaatagaatgtagaaatgtttgatgtcaaaaaagagaatttgtggtaaaataaaatggattatgtagaaacagaaaagaacggaggtcaacagttggaagcttatacagggtttgcggcggtctacgacattttcatggataatgtaccttacgaagagtggggcgaatacattcacagtcttttaaaagaccgtggaatagaggatggcattcttttggatctgggctgtggcacaggaacaatgacagagaagcttgcggattatggatatgacatgatcggtgtggataattcagaagatatgctggagcttgcgatggagaaacgtatggagtcagggaaggacattctttatctgcttcaggatatgcgtgagttcgaattatatggaacagtaagggcaattgtcagtgtctgtgattcagtcaactatattacagaaccggaggaactggaagaagtattccgtctggtgaataactacctggatcccaagggagtctttttgtttgattttaataccgtatataagtataaagaagttatgggagatacggtgattgcagaagacagaggggaatgtagttttatctgggataatttctattatgaagaagaacggatcaatgagtatgatctgactctgttcattcaggaagacgcaaatgaagatttgtatcggagatatcaggagacacattaccagagagggtataccttagaagagatgaaagagctggtagaatgttcggggcttgtttttgaggcggcatatgacgcagttacacacgaggaaccgacagagaagagcgagagaatctatatcgttgccagagaatccgggaaatgaattggatacaattcttgaatagataagaaagacgaggagaataagatatgaatgattatattgtaagagcaacagcaggaaatgcacagatccgtgcatttgtggcagtgacaacaaacctggttgaggaggcaagagagcatcacggaacaagtccggttgcgacagcagcgctgggaagactccttacaggtggagtgatgatgggaagcatgatgaagaatgatacagacatgctgacaatccagattcagtgttccggtcagatcgaaggtctgactgtgacagcggacagcaagggaaatgtaaaaggatatgcatttaatccggatgtgatgcttccggcgaagaatggaaagcttgatgtcggtggagcacttggacagggcgtcatgacaatcatcaaagatatgggactcaaggagccatattcaggccagacaattctgcagacaggagagatcgcagaggatcttacttattattttgcaacgtctgaacaggtaccatcttctgtcggacttggagttctgatgaacaaagataatacagtgaaatgcgccggtggatttatcgttcaggtaatgccttttatcgaggatgaagtacttaataagctggaggcaaacattcagaagatccagtccgtaacatccatgctggataacggacatacaccggagcagatgcttgagcaggttcttgaaggacttgatttggaaattacagatacaatgccggcacagttctattgcaactgctctaagaagagaatcgagaaagcaatcatcagtatcggaaagaaagatattcaggaaatgatcgatgaaggcaaagagattgaagtgaagtgtcatttctgtaatacagcatataagtatacagtagatgaattgaaagaattgttaaaacaggctcgataagtattgccggggcttttgccctgacatcaaatatagaagatggggtgaagatgagatgaaaaatggatttgtgaaggttgcagcagcgacaccggatatccgcgttgcggatgtggaattcaatacacagaatatcatcaatgctatggaagaagcacagaaaaatggcgcgaagattcttgtgtttccggagctttgtgtgacaggatacacctgtagtgatctgttcgaccacagcgtacttctgaaagcttccagaaaagcattgcttgagattgcagaaaatacaaacgataaagatatgcttgtatttgtcggagcaccgcttgaagtgaatggaaagctttacaatgtagctgcggcaatgaaccagggcgagatcatcggatttacgacaaagacgttcctgccaaactatggtgaattttatgagatgcgccagtttactccgggaccacagacagtgagagagattacatttgaaggaaagaagattccattcggtccgcagattctcttccaggcagaaggaatggaagaactggtagtggcagccgagatctgcgaggatgtctggtcaccgatcccgccgagtattcaggcggcacttgaaggtgcaacagtgatcgtcaactgttccgcaagtgatgagaccatcggaaaagacacttaccgtcgtgcactgatctccggacagtctgcaagactgatctctggatacatttatgcaaatgccggagaaggggagtcaactacggatcttgtttttggcggacacaatattattgctgaaaacggaaccgttctgaaagaaagcagtagatatgtaaatgaaattatttactcagagctggatcttcagagaattacaggtgagagaagaaagaatacgacattccagccattggatgaagagactctggtacgtgttccatttaccgtggaagagacaaagacatttttgacaagaacatttccgaagaagccgttcgttccttctgatgaacagacccgtgcacagcgctgtgaggagatcctgacgatccaggcaatgggactgaagaaacgtctggctcatacgaatgcaagaactgctgttgttggtatttccggaggtctggattctacacttgcactgcttgtaacggcacgcgcatttgacatgcttggaagagataagaaagacatcattgctgtgacaatgccttgctttggtacaacagacagaacttatcagaatgcctgtgagatgtcgaagaaagtcggagcaactttgatcgaggttccgatcgcagatgcagtgaatgttcatttccgtgacatcggacatgatccggaagatcacagtgtaacttatgaaaactgccaggcgagagagcgtacacaggtgctgatggatatcgcaaacaagacttggggaatggttattggaacaggcgatctgtcagagcttgcgcttggatgggcaacttacaatggagatcatatgtccatgtacggagtgaatgcttctgtaccgaagacactggttcgccatcttgtaaaatatgctgcggatgatacaaaagacgaagctcttaagaatgtactttacgatgtacttgatacaccggtaagtcctgagcttctaccgccgaaggacggagatatcgcgcagaagacagaagatcttgtaggaccttacgaactgcatgatttcttcctgtatttcatgcttcgttttggatatgagccgagtaaaattttccgtattgcatgtatgacatttgatggtgaatatgacaaagagatcatttttaaatggctggaaacattctgtagaagatttttctctcagcagttcaagcgttcctgtctgccggatggaccgaaggttggtactgtggcactttctcctagaggggactggagaatgccaagtgatgcctgcgtggcagtatggatgaaagatcttgaggcttgcagagtataatctgtggtgaaaaccagagaaaaggagaacaagataagaaaaatcattgcaggatgtggaaaatcagcatccggcataaatttggggaaagaaaaggagaggataagatgaaactaatcagaacagaggatgcggtcggcagtgtgctttgccacgacattacccagattattccgggagttgtgaaggatgcggtcttccgcaaaggacatgtagtgacagaagaggacgttccggtactgctttctgtaggaaaagaacacctctatgtatgggagaagcaggaaggcatgcttcatgaaaatgatgcggcagaagtactgcgtcaggtatgccagggagagcatatgaatgcatctgaggcgaaagaaggaaagatcgaactgactgcacagtgcgacggccttctgaagatcaatcgcgagaaattaaatgaagtaaatgcgctcggtcagatcgtgcttgcatccagacatggcaatttcccggtgaaaaagggagataagatcgtaggcatgcgtgttgttccgctagtgattgaggaagagaagatgaatcatgtgaaagagctctgtggggaagagccgattttcacaattcttccgttccatcagatgaaagtcggaatcgtgacaacaggaagcgaagtttatcatggaaggatcacagataaatttactccggtcgtaaaagcaaaattagaagaggcaggcatggaagtacttggaaatgtactctgtgacgatgactctcagatggtaacagatgcgatcaatgaatggatcgctaagggcgcggaatttgtagtctgtacaggcgggatgagcgttgatccagatgacagaacaccgttatctatcagaaatgcaacggatgaggtgatcacttacggtgcgccggtacttccgggtgcaatgttcatgctggcttataaaggagagattccggttgcaggtcttccgggatgcgtaatgtatgcaagaagaacaatctttgatttggtgcttccgagaatcgcagcaggcgagagattaagtgtagaagatttcacagtgcttggagaaggcggactttgcttgaactgcgaagtatgtacttatccgaattgtggatttggaaaataataataaaaaagtgcttttaattttttgagttcaatagtattttgtcaactgtatttataacgtcacataaacacctgtaacggggcaggtgtttatgtgctattttattgaattcgcaaatttctcttttcagcaaaatgttgtatgttcttgacagaacggaatcgttttgttatagttagtccacatcaaaatctcagacaatatttttcttttaaattcgtttgtctgaaagcgctatctgaacggataacttatctcatattcaaggctatatcagcaagagattccattttgatgaattacgaaactataaaaaataaagaaatacaaggaggtactgtctatgggaaaagcagatgtaaatgttaacatctggctcaatgaaaagaagcggtttgctgatttatttaacggggttctttataaaggaaagcaagtgatacggccggaagagttggaagagataagtccagtggcatcggttagtataaaaaatcgggtagggaaaacacgaaatatgaaaaagtatcgagatattgtgatgcgatggaaaaataatgctacattcgttcttcttgcaaatgaatcacaggataaaattcattatgccatgccacagaaagtaatgctctatgacggaatggattatgaagaacagattcgaaatctgtggaaacaacgaatggagtgtcagaaacaggcaagaagaattggaaaacctctggaacatcttacggcagcagaatatctatccagatttagaaagaacgacaggctgataccaattatttcacttgttttttattatggatcagatccatgggatggtccacaggatctttatgatatgtttcgactggaaggaagcgaagaggaaaaggtcgttttagagaaatatttaccaaattataaaatcaatttggttgatgcagaacgcatgaatgagcaggaaatcaaatatttttcggaagatttacaagtgatattaaccatgctaaaatatagacatgaaaagaatgaactaaaagaatacatcaataaacagaaaagatactttcagaatgtagattatgagaccagtcaggtaatcaaagtatttttaaatatgaagtcaataccgggtgagacggatgaaaggaaggtgaatgtcaacatgtgtgaagcacttgaagaaatgtataatgatgctataaaagagggaatggaagctgggacaaaaaggaaattaattgagcaggttatgaaaaaagtaaaaaaaggactttcagcagaagaaatctctgatatatttgaggaagataccgaaataatcaagaaaatttgtattgcgattcagacatgtgaaggtcagtgtacaattgacgatgtttatgagcaattatataagtaatatgagaacaggagaacagaacatgaattcattttacattcagttgcaggcagaacttgcagatgcaaaagaagagctttgggcacagactcggattgatggtgctgaagcaggaaagaaaattctgttaaaaggtgaaccgaaggatacagacagtgtttttgtagatgaacaaggtgaacgtattttccaggagcgtatcagccgtccggcgaagctggtgatctgcggggcagggcatgtatctatgccaatcattcgcatgggaaagatgcttggattccatgttacggtggtagaagaccgtccgaaatttgccgatgatgcgagaagagcagaggctgaccaggtctattgcgaaccatttgaagatggtcttgcaaagatcaaaggagatacagatacatggtttgttattgttacaagaggtcacagatatgacacagactgtctcagaacaatccttggaaagccaagagcttatgttggaatgatggggagtaagagaagaactgcgatcgtaaaagaccagctggaggcagaagggtttgagagagatgtgcttgaagcagttcacacaccaatcggtttgaagattgctgccgagacaccggaagagatcgcggtatctattatggcagaaatcattcagattaaaaacagtcgtgcaaagagcggtggatattccagtgagcttcttgaagaaattctgaaagaagatgagtgtggaaaagtgcttgcgacaattatttccagaaaaggttctgcaccacgtggcgtaggaacaaagatgcttgtatgcggagatggaaggatcatcgatacaattggtggaggatgtgtggaaagtgagattattcagaaagcactcctcatgatccgtacggagcaggaaggattccaggtatgcaaggtagatatgacagcagaggcagcagaggatgaaggtatggtctgtggcggcgttgttgaagttatgctcgaaagggtaaaataagcgctctgaaaaaagttaaaatgatagtagtaattgagagtggagaataagaaagatggatgatatcaaaattttaaaaggaaatattatctatacaaagacgaaagatgaatttgagatatgcgaacacggttatcttgtgtgtaaagatggaaaagtagaaggaatctatcagacacttccattccgacttggaggggaaccaattgaggatcatggagattgtctgattattccgggaatgatagatctgcatatacatgcaccgcagtatacattccgcggtacagggatggatctggaacttctggagtggctggagacgaatacatttccggaggaagcaaaatacaaggatgtattgtatgcgaatgaggcgtatgcgaagtttgccaagaacttgaaacatagttcaacaacaagagcatgcgtctttgggacaattcatagaagatcgacacttgttctgatggatcatctggaaagaagcggtctggtcacgatggtcggaaaagtgaatatggacagaaattcaccggatgaacttcgtgaaggtacacaagagtctgcggaagaaacagtggaatggatgaaggatgtgcagcataaaaagtataagaatacgctgccgatcctgacacctcgttttattccgagctgtacggatgagcttctagatatgctgaagatggttcagatgcgttaccagattccggtgcagtcacatttatcagagaatttatcagagatcgaatgggtaaaagaactttgtccgtatgcagagttttatggagatgcatatgatcattttggtctgtttggagcagatgcaccgacggttatggcgcattgcgtatacagtacggaagaagaaatccatagaatgaaagagaacggtgtgtatgtagcacattgtccggaatcaaatgagaatctttcttccggaattgcaccggtaaaacgttatctggaagaaggactttctgtaggatttggaagtgatgtcgcaggaggatcgacagagaatcttttccgggcaatggcacatgcaattcagatgtcaaagatgcgctggagacttgtcgatcagaaatatccggcattgaagtcagaagaagcattctatatggcaactaagggtggcggatccttcttcggaaaagtcggaagttttgaagaaggatatgaattcgatgctgttatattagatgacagcagacttgaatcctcccgtcagatgagtgtgaaagatcgtttggaaagaatgatttatcttgctgatgagagagaagtgaaagcaaaatacgtcagaggaaataaaatcatataaaacacatgaaaaaacctcaggttcgggtgttgcagcaccgttctctgaggttttttcattttctattttaggagttttaagtaattgacttattcaatcgatttttcaatattaaaggtggattcttgttccagtctcaccaagaattccgtcttttgctttctcaagcagtgtgatcagtgactgtcttccaggtttggattcagcaaagtcaagagctgcctgtaccttaggaagcatagaaccaggagcaaaatgtccttcttctacatactgtttcgcttcttcaactgtcacatcgtcaagccatttctcatccggctttccgtagttcagtgcaactttctctacagcagtcagaatgataaggaagtctgcgtcgagctctttggcaaggagagcactggcaaagtctttatcaataactgcacttgcacctttcaggtggttgccctggcgcataaccgggattccaccgccgccacaggcaataacaaggtcaccggagtcaaccattgtacggattgtaccgatctcaacgatctcctgcggttttggagatgctacaacacgacggtatccgcgtcctgcatcttccttcatgatataatcatatttctcagccatgacatcagcttcttccttagaaaggaatttaccgattggcttggatggtgtctcgaaagccggatcatcagcatccacgcgaacctgagtgatcattgtagcaactgggatatcatgaattcctctgttgaacaattcttctctcagggcattctgcaggtcatatccgatgtaagcctggctcattgcaacacatacagaaagtggtgtgtttggctgtttctcatcctcatgtgtcaatgcgatcatagcgttgttgatcataccaacctgaggaccattgccgtgtgctacgactacttcgcagccttcctgaatcaggtctacgatcgcgcgtgctgtaatcttaacagcagccatctgctcaggaagagtattgccaagggcatttccgccgagggcaatgacaatacgttttttcttttccattttaggatcctccgtatttactgtaaaggtattgtacaggtctgaaagattcaggcctgtacaataagttactaattaaggtaactatgaaactatttttgtctgagaaatttaaacttactcaaaaattctggacattcctctttcttcgagcttcttcaggatttcctgtgggttctcgaatttagcaaggaagatcatagctgcgatgatgtatggtttgaagctagcttctttgtaaagtggatctctgtaacgatcgaatacggaagcgtcaacttcaccttcttcacagcttacgcctgagatgtcagctggcagacagtgcatgtaaagagcttttccgtcttttgttgtagccatgagctcttctgtacaagcccagtctttgtgctctgcattctgagcaagaagttctttctcaagagctttgataccttctgtatctccgtttccataaagctctgtacgtttttccatagctgcaaatggagcccagctctttggatatacgatatcagcatctttgaatgcttcagccatgttgttagtcttcttgaaggatccgcctgatttcttagcgttctcttcagcaattttctcaacatcctcgaatacttcgtatccttctggatgagcaagaacaacgtccattccgaaacgtgtcatcagaccgatgactccctgtggaacagaaagtggttttccgtaagatggtgagtaagcccatgtcatagcaagttttttgcctttcaggttctcaactccgccgaactcatggatgatgtgaagcatatcagccatacactgtgttgggtggtcaatgtcacactgaaggtttacaagtgtaggtttctgctcaagaattccgtccttgtttccttctgttacagcgtcaacaacttcgtgcatgtatttgttaccttttccgatgtacatatcatcacggataccgataacatcagccatgaaggagatcatgttagctgtctcacgaactgtctcaccatgagcaacctgagattttccttcgtcaagatcctgaacctcaagaccaagaaggttacaagcagaagcgaaagagaaacgtgtacgtgtggaattgtcacggaacagagaaattccaagtccgctctcgaatacctttgtggaaatgttgttctctctcatgtaacgaagagcatcagctactgtaaatacagcttcgatctcgtcgtctgttttctcccatgtaaggaagaagtcaccattgtacatctctttgaagttgagtgcgttcagtttgtcaatatatccctgtaattttgcgtccatctttaaaatcctcctgattaaaatgaattatttgtttttaggtttattagccaaggcggttccggccggaaattatccggtcagaacgccataggttcaatgaattggttgcgtgatcacacgcaagtgcgttagcaaatactgaattactcagcgtaagacagtggaagtgcagcgtatactgcagcacatgttacgagatcctgtttccatgtcatctcgtttggtgcgtgagcctgagcctctgctccaggtccgaatccgatacatgggattccgtttctacccatgatagaaacaccgtttgtagagaatgtccacttatctgtcagaggacgagcctgacgcatctcaagtgtgtcagcagcaccgattctctgatctccgtaaagtcctgtgtaagctttctcaagagccttagttactttgtgatccttcggaatagcccatgttgggaagtagcactcgatctcgtatacacatcctgtgtaggacggacgatcatagttgtacatagaaacaacaacgtcatcaccgtatttcttaacgcttggcaggttacggatctcatctaagcagctctcccatgtctctccgaatgtcatacgacggtcaagagatacagcacaggaatctgctactgcacaacggcttggtgatgtgtagaagatctgagatgttgtaactgttccacgtccaaggaaacgagcctcttcgtagtcagggttgaatttcgggttaagcattttaacaagacctttgatctctgtctcgtcagcgtcatcgttctcgttaagagcacgaacatcctgaagaatgtcagccatcttgtagatcgcgttgtctccacgctccggagcagaaccgtgacaggaaactcccttaacatcgatacggatttccatacgtcctctctgtccacggtagataccaccgtctgtaggctctgtagaaactacgaactccggacgaatcttgtcttcgttgatgatgtactgccagcaaagtccgtcacagtcttcttcctgaactgtaccaacaaccattactttgtatccttctggaatgagtccgagatctttcatgatctttgctccgtatacaccagatacgataccgccacactggtcagatactccacgtccaccgatctctgtctctgtctcgtatccatcgtatggatcgaatttccagttatcgatgttaccgatacctactgtatcgatatgtgcgtcaaatgcgatgatcttgtcgccagttcccatgaatcccataacatttccctgtgggtcgatgacaacttcgtcaaatccaactttcttcatctcagcagcgattgtctctacgtgagctttctcatcacagctttctcccggattttttacgatagcacgaaggaaagcagtcatgtctttctcatagccttttgcatactctttgattttgttaagatccattgttcttctccttttgaaataaaatcttgttttggtgttacagtttcttcttattgtattgcgagaaatgattatctctcatttccgtcccagacaattgatttgtatctatccggatcagtgtctccctcagtagagaagagaagtacttttgagttctcatccaatccgaggtgctctctgagcggtttgtactcatccattgtcatgatgcacgcaagtgttccaaacggtgcggctccggattctccggaagtaacaggctgatcacctttgaaaggtgcagcaagcatacgcatacctttggcagcaacccagtcaggtgttgcgataaatgtatcaacgtggtttttcaggatatcccatgaaattgtgttcggctctccacaagcaagaccagccatgattgtaaccatgtctccgtctacgatgcggatagctccgtccttagcacatgctcctttgtaaaggcatgcagcaggcgcagcttcaacaacaacaactttcggtggattttccggatagcggttagcgaagaatccctgaactgctccggcaagtgaaccaacaccagcctgaataaatacatgtgtcggacgctcacatccagcttcatgaagctgatcatcagcctcgttagccattgttccgtatccctgcatgatccatgctggaatctcttcatatccgtcccaggctgtatcctgaaccattacgccgttctctgtcttctctgccatagcgttagccatacgaacacattcgtcgtagttttcctcttcgattgtagctttcgctccttctttcaggatgttgttcagtcttgtctgagttgatcccttcggcataagtactacagctttctgtccaagcttgttcgctgcccatgcaacaccacgtccgtggttaccatctgttgcagtgaagaaagtagcctgtccgaattctttacgcagttcgtcagatgtaagaacgttgtaaggaagttctgaaacatcctttcctgtctgctttgcaatgtagcgagccattgcgaaagatccgccgagtactttaaatgcgttcagtccgaaacgataagactcatcttttacatagacctctttcagtccaaggtatgcagccatgtgatccagttttacaagtggtgtaacactgtactgcgggaagctctcatggaatgcgcgagctttcgctacattctcaagtgacattacctgaagctgagagtcatctgtttttggcatttcgtttactgcccatttgatagtttccattatagtgacctccttaaattaatacgtgtcatttgcccatgtaactgtaaagtgtgaatttcgatatccccaaatacgaagaaactttatcgccggactttgtaataaggaaagcaccggcatgatccagatactggacaacagcaactttgtcatctttgttcatcattgcaactggctttccgacctttgcaacggcctgctcaatcaacaaatccagaagttcatttacattatgtgtgatctgccgtggcgaatcacctgtaagatccggaagattgtctttcgtagcgatcaaagactgaattgctgtactcgcagctgtaaaagctgtgatgtcatagtttaatgagaagatgtatgagattgatccgtcatcgtctcttatatagaaggtactcgatttcaggatccgtccatcttctgttttagtaagataggaaagcttatcatgaatcgttgacggatccgactgaagtgtctcaagaacaattcctgaaggaccatctccggtctgtcggttcgatacatgtccgttctcgatgtacacgatcgatctctccagatcttttgtcttcaaatcatgaattgcaatctcacaggaacttccaaattgaattgcaagtccgtgtgcaagctgcttaagaaaatctaaggtatggcgcatatgtccacctgcctttctacatgctttctgtcttcataatcccataatatcataaaaatcacgatagtcaatacctttcctaaaaattttttaggtaacaaaaaacttttttagatttcttgttgcatttagacaatttagatgttattctatgtgtatcagagacgttgatgtacgaaatgcacataacaggcagatggcatttcaacatcaaagtgtagaaattcataaaaaggagaggttacaattatgttgatcttaggtaatggtagagttgtgacaagaaaccctgaatgtccttatatggaagagggcgcagtagcaattgatggtaaagtaatctgtaaggttggaccaacagatgagttgaagaaggcttatccagatgcagagtttattgatgcaaaaggcggagtgattatgccggcattcattaatactcatgaacatatctatagttcttttgcaagaggacttgctattaatggatacaatccaacaggattgctcagcattcttgaaggaatgtggtggacactggatagaaacctgacactgaatgatacttatttaagtgctatggctacttatattgattctattaagaacggtgtaacaacagtatttgaccatcatgcaagctttggagctatcaaaggttccttatttgaaattgagagagcagcgaaggaaacagggattcgttcctgtctctgttatgaagtttccgacagagatggaaaagacaaggccagagagtctgtaatggagaatgcagaatttattcgtcatgcactgaaggatgatagcggaatgatcgccggaatgatgggtatgcatgcacagtttacaatctcagatgagacaatggaacttgcagcagcaaacaaaccggatgaagttggttatcatattcatgttgcagaaggaattgaagatctgcatcactgcctgaaacattatggaaagagaattgttgaccgtctgatggacttcaatattcttggggagaagacactgcttggacattgtatctacatcaacccacatgagatggatctgatcaaagatacaaacacaatggttgttcataatccggaatccaatatgggaaatgcctgcggatgccctccgacaatggaacttgtacacagaggaatccttacaggacttggaacagatggatatacacatgatatgatggaatccttcaaagtagcaaatattcttcataaacatcacctttgcgatccaaatgcagcatggggagaagttccgaaaatgctgtttgagaacaatgcaaagattgcaggacgttatttcgaccagaagctcggagttcttgaagaaggcgcagcagcagatgtgatcattgttaattacaatccgctgacaccaatgaatgagaataacatcaatggtcaccttgtattcggagtaactggacacgatgttgtgacaactgttgcaaacggtaaagtattgatgaaagacagaagactgacagagattgacgaagcgaaagttatggcagactgcagacaggcagcagccgaacttggaaaacgtatcaatagtcgttaggcttagattgacggatactgttcattaatgttaacatatataacagatgtggacagtatctttgatcgcacatttcgtcaaaactaaccggaaaggacaataaaataatgaaagaaaagaaatcagaagcacctcgcagaggaaacgaagaactgtttaagtgggatggtaacccgacatttggtcagatacttccgcttgctgcccagcatgtacttgcagcagttgtaggatgtgttacaccggcaattctggttgcaaatgcagcgaataatgcaggcggaaatgtaaacatgggtctcttgatccagatgtcacttgtatttgcagcattatcaacattccttcagctgtatggaaataagatccatcttggatccggacttccggtcatcatcggtgtaagttttgcttatgttccgacaatgacagcaattgcagcacaggctcaggacgttaacacgatttttggcgcgatgatcgtaggtggtattgtagcaattatcgttggacttactattaagcagatcagaaaggtgttcccaccactggtaatcggaactgttatctttgcgattggtctgtctctttataagacagccattaactacatggcaggaaactccgcgaacacatatgaagtgatcgtagagcagagaggtcagacagcagcacttgtttatggttcctggcagaactggcttgtatcccttgtaacactggcaatcgtaatcggtctgaaccattacggaaaaggacttttcaaacttgcatctatcctgatcggtctggtctgtggatatgtacttgcattgtgctttggaatggttgatttttcagcactttcaaacgcaggttggttccagcttccacaaccgttcgctttcggtgtgaaattcgatatctcagcgattatcccgctggcgattttgttccttgtcaattccattcaggcaatgggagatttctccgctacaacaagtggtggtatggatcgtcttcctactgaccaggaactcaacggtggtatcatcggttatggtatcagtaatatcgtaagtgcatgtttcggatgtcctccgacagcaacttacagccagaacgtaggtattgttggttctacaaaagttgtagcaagaaaagtattttcactttcagcatttatccttctgattgcaggactgattccgaaattctcagcacttctgagaacaattcctcagtgtgtacttggtggagcagtagcatctgtattcgcaggtatcgcaatgacaggtatcaagcttcttgtaagtgaaggtatgtctacaagaaatacaacagttgcaggattatctattgcaatcggtatgggtgtatccttaagtaacggatgcttaaatcagatgacatcaacaatttacgatggattaggaatgacaatgggacttgagaacttccagtccatcatcaataacacatttgcatcatcaccggttgtactggcgacaatttttgcagttattttgaatctggttcttccgaaagatccaaagccggaggcaaaatagaaggaaacagatctttgagaaaagacaggttcttggggaataatctgtcagtgatttcaaagatttaatcattacggaagaacctgccgatggcaggttttccgtgataaaagaaaaaaagagaggtaaaaagtatgagtgaaattatgagacctatgtcatttgaacagcttttaaactggacattgacagagtacaaagagaatggaacagtatttggagagcgtcatccatatcatgcggacagcaagttcaaccgcacaatcttcggacgcgatcttgagacaccaatcggaccggcagcaggtccaaacactcagctgacacagaatattatcgcagcttactacacaggaagccgtttcttcgagctgaagacagttcaggtaatggacggagacgagcttgcagcatgcatcaacagaccatgtatcaaggctgatgacgagtgctacaactgtgagtggtctacagagctgtttgttccacaggcaatggaggagtacatcaaagcatggttccttctgaaagtgatctcaaaagaattcggacttggaagcatggacggattccagttcaacatcagcgttggatatgatcttgccggaatcaaatcagagaaggttgacacattcctgaacacaatgcagcatgcacaggattcagagattttcaagcactgcaaggcttatcttcttgagcatgttgacctgttcgagaaagtgacagcagaagatatcgaaagcatttccggtgatatctgtaattctgttacaatctctacacttcacggatgccctccggaagaaattgagaagatcgcaatgtatctgatcacagaaaagggattccatacatttatcaaatgtaacccgacacttcttggatacgagtatgcaagaaagacaatggatgacatgggatacgattatatcgcattcggtgacttccacttcaaagacgacctgcagtacgaggatgctgttccgatgctgaacagactgatcgctgtctgtcaggaaagaaacctggagtttggtgtgaagatcactaacacattcccggttgatgtaaaacagaacgaacttccaagtgaagagatgtatatgtcaggaaaatctctgtacccactttccatctccgtagcaaatatgctggcaagagattttggtggaaaactgagaatctcctattcaggtggtgctgatttccataacatcgaaggaatcatcgatgcaggaatctggccggtaacaatggctacaacaatcctgaaaccaggcggatatgacagactttgccaaattgcaggacttcttgagaaagaaggcgttgtattcacaggtatcgacgctgccaagacagagaaactggttgaggaagcaaagacaagcccatatcatgtaaaggctgtaaaaccgcttccgtccagaaagatcaacaaacaggttccgctgatcgactgcttcatcgctccttgtaaagaaggatgcccgatccaccaggatatcacaacatatctgcagcttgtagaagctggtaaatatgaagaagctatggatgttatcacagagaagaatccacttccattcattacaggaacaatctgtgcacatgcttgtatgggcaaatgtacacgtaacttctatgaatcaccggtacatatccgtgagatgaagcttgaggcagctcagaacggatacgaagcactgatgaacaagctgacagcacctgcaatcacaaaagaaggtaaggcagcagtgatcggtggaggaccggctggtatggcagctgcttacttcctgcgcagagccggaatggcagttacagtatttgagaagaacgacgctctcggcggtgttgttcgccacgtgatcccagaattcagaattcctggaacatctattgataaagatgcagcacttcttgagaagatgggcgttgaagttcgtctgaacacagaagtaaaagatacagcagcactgaaagcagaaggatttacaacagtgatccttgcagtaggagcttctgagcctggggtattaagacttgagcagggtgaagctaagaatgcactcgagttcctggctgacttcaaggcaaatgacggaaaacttgatatcggtaagaacgttgtagttatcggtggtggtaacacagcaatggatacagcaagagcagcaaaacgtacaacaggcgttgaacatgtatatcttgtatacagaagaacaaaacgctatatgccggcagacgaagaagagctggtaatggcagtagaggacggcgtagaattcatggaactcctttctcctgttaaacttgagaatggaaaactgatctgcgaagttatggttcttggcgatatggatgcttctggaagaagaggcgttgttaagacaggagaactcaaagagatcccggctgatacagtgatcgcagctgttggtgaaaaagttccgactgctttttacgaggcaaatggaatcaacgtaaatgacagaggacgtgctcttgtaaatgaagagacattagagacaaacgtagagaacgtttacgttgttggtgacggacttggcggaccggctacagtagtagaaggtatccgtgatggtctcaaagctgctcaggcagtgatcggagagactcttgtaagagatttcgatgcagagacagatgaagctgttgtatacgagagaaagggtaacctcgaagacgtacgcgaagacagcacagaggctaagagatgtcttaactgtgcgggaatctgtgagaactgtaaggaagtttgcccgaacagagcaaatgtagcaatcaaggttccgggactggagaaacatcagatcatccatgtggattacatgtgtaatgaatgtggtaactgtaagagcttctgtccgtacgacagtgctccgtacctggataaattcacattattcatggacgagaacgatatggcagacagcaagaatcagggattcacagtactggacaaagatgcagtacactgcaaggttcgtttctgtggagagatcctcgactggacatttggagaagagacaaagattccggaagcacttcagaaagtaatggagactgtttgcaaggactacacatatctgttaagataatagcagaaggtttatgtgagattgctccggtggaaattgagtgagaccagagtgataatatgtgagatagatagctcacaggcatctgcctgtgggctatcttcttttcaaaagacgcagaaatatagaaagaagggatctgtaaaatgataagctatttcagagatgacagactttgtgaagcagactctttcttatcggtagtaaagcctgactatacagaatgtccgatgatagctgctgtcggtgcgggaggaaagacctctacattgagaaggcttgcagaagagtatgcgctgatggggaaaaaggcaattgttcttacaacaactcatatgagagaagagacgactccatggagttgtgtggctgaagaggaagagtggattagtaaagggaacgagctgcttgaacgagtgaaggaatgtcttgagcaatacggacaggcctggattggggcaagagcgaaaaaagggaaaatgagctgcgttccggagttgattctggcagagatagaaagctggaatgtgccattacttgttgaagcggacggagcaaggatgctgccgttaaaagtaccgggagaacaagaacctgtgctcctgccacagacaacacatgtattttctgtttatggaatggacgctttggatcaaaagttggaagaaatctgctttcgaagtgaaaaggcggcagagcttcttggaaaacagccggaagatcaggtgacagaagaggacataataaagcttgcctgtcatgaacagggcggtcgaaaaggctgtccaaagcaggtagagtatattgttgtactgaataaggcagatacaaaggagcggcgagacagagcgtgtaagattgcaaagtgcttgtatgagaatggaatcaagaatatatttgtgacatcttatatgctgtaataaatattgtagaaaaagtgcagagattattcttgaacgtaaataaattagaaaataacggagaatcatagaagattctcaggaaaatagatgggaagtattgagatgaagatattgattaaaggtgcgggagacctggcaacaggaatcgcatccagattatatggcgcagggcatcagatcatgatgacagatattgctgtgccattgacggtccgcagactagttgcattttccagagcggtttatgaaggtgaggcagttgtagaagatatgacggcgcgcctggcaaagaatcaggaagaagcagaggagattatggaacagggagatatccctgtgatcgttgatccaaaggcagaatgtatacagtggtttcagccggatgtgatcgtggatgccatccttgaaaagagaaatctcggaacaaagatcacagatgcaccatttgtgatcggagtcggacctggatttactgctggagaagattgtaattgtgtagtcgagacaaagagaggacatacactgggtaatgtgatctgggacggaagtgcgatcccgaataccggagttccgggaaatgttgggggatattctattgagcgtctgatcaaagcatccgcagatggggtgatcgaaccgaaggctgtgatcggcgatctggtacgaaaaggacagatcgttgcaattacaggcggagagccggtttatgcgctgatggacggtatcgttcgcggaatgcttcagccaggtgttcaggtgacgaaggggctgaagatcggagatattgatgctcgtgcaaagcaggagcattgccggacaatctcagacaaagcaagggcgatcggcggaggtgtgctcgatgcagtctgcagttatgaaaagagcagaggaaaatacgcattgatcttgctggcggcaggtcagagtgttcggttcggttcagataaactgaaagcagttgtagaaggtgaagcaatgtatgaaagtgcgatcagccggtttgaagcatttcagggattcaagtcttatgtagtgacaggaaaagaagagattacactttcagcagagtcagcaggctgcacggtggtatgcaataaagaaccggagaagggaatctctctttctgtaaagctcggtctgacaaaggcaatcgaggatgcggatgaaaatggaacaccgcttcgaggagtcctgttcagtgtctgcgatcagccaagattaaaaaaatccacgattcagagaatcataaatacagcatttcataatccgggaaagatcgttagtgcaggagaaggaacaagaaatggcaatccggtcttgtgggataagagattctttgataaacttttggagttagatggagatatcggtggaaagaagatattgaaagaaaacttagattcgctgaaaattgtgccggtacaggcgggagaacttcaggatattgatcgcaaagaagatctcggaacggcataatgatagaattgctggttgcatatagtgtgaacagtaataaaaatagcagcggtgagctgaaaggagaatgcaaatgcgggtaggagcagtgattgcggcagcaggaaaatctggtggatataagagttatgataagatgaagtcggtggatggaatccaggttctgcgtcagatgattttaaatttcaagagagcaggcgtggatgagatcgtgctgatcacaggataccaggcggagcaggtggagaagaaactggcgaagcttggtgcagtattccttcgcagtgaagattatgagaaggaagagatgatcacgtcagcagttcgagggatgaactacctgaaaccgcgctgtgagaaattcttcttctgtccggcaggagtttctcttttcacagaagataccgtacgtgtgttgatgcaaaaagcgaaagaaaatgaaaacgatcaggagaaagtctatgtacctgtctgggaagaacgaaaaggacatccgatcctgatggatcgcagtatgatcgatcagtttgcttcttatgaaggtgaaggtggacttaaaggcgccatggatgcgctgaatgtagaacgcattttcgttccggtggaagacaacggtgtagcgatttactccggacagggagaatctttccgtgagattttcaaagagaaggaaaaggagagaaaaatccgtccgagagtgaagcttcagttggagaagaatgagaacttcttcggtccgggaattgtattccttctgcgtcagatcgatacacttggttcggtaagagacgcctgtgcaaagacaggaatgtcttacagcaagggctggagcctgatcagaagtgcagagaaagaactcggatataccgtcgtagagcgaagtccgggaggcaagcatggcggtgtagccagtgtaagcgaagcagggaaagacatactcagaaaatatgaactgttggaaaaagatgtggcgaaatatgcagagaagagatataaggatatatttgaatcttgatctgtcttttacacgcaatatgtgaaaagaagaaagctaatattagcgaaaaaagcggtcacatgacattattaaaatacagttaatgaaaaaagttgcgtaaatcgcaactttttcaagaaaagcgattgttaaaataaaacaaatcggttataataagaccatcatttataaagaaaagacaggaataattacaacatttttatgaacaaggcgcctgtcaggaggagataggatgaaaaagagaattttagcagcaatgatggcagccgtaatggtgttttctatggctggatgtggatccaaagccgacgaaaagacagacgacacagcaaaaacagaagcaactgacaacaaagtcagtgatgaagaagaaacagagatccaggtatttattgcagccagcttgaagaatgtaatggacgaactcgcagcacagtacaacgaagaacatccgaatgtaaagatcacatacaatgcagacagttcaggtacacttctgacacagattgaagaaggatatgagtgtgatatcttcttttcagcagcacagaagcagatggaccagcttgagtccgatggtcttgtagtagacggaacaagagcgaatgttgttaacaaccaggtagtagttgtgacaagaaaagacagcggaacaaaggtaacaggacttgataacttaagcgaagcagaaagctttgcacttgccggtggaagcgtaccggtaggtaagtatacaagaactgcacttatgaatatgggtgttcttccgaaggtggatgatccttcagcaatcacaacagaagaagtatcagaagcacttggcggacttgagatcagcgagcaggacaacgtaagcaaggttctttccgcagtagtggaaggatcttgtgaagttggaacaacttactactctgatacatatggattcgaggacgaactcgatattcttcagacagtagggtatgatctgacaggaaatgtaatctatccgatcgcacgtgtagtaaatgatgaggctgatgatgcacagaacgcagtagcagatgatttcatcaagtttgttctgtcagacaatgcaaagaaagtatttgagtcttattacttcgatacaaatgtagaataaagatagtgtgatggtaacggatgtgttactatagaagcagagggttactgttcactcccgtgtcaatcactttgctgattgacacggaggatgcgtgttttgacttgaatgcatctcgccccatcgccaaaggcgatttaaaatggcgagatgcgttgctggtcgcacatcgtgtgaacagtaacagcagaggctgccagaaatgaaaagtttcggacagcctttttcttatagttgtaaaggagagtgaatgatagaatggatgaaatgatggaaatcctgaagaatctggactggagcccattatttatatcaataaaaacgggaatcgtagctacgatattttccttttttcttggaatctatgcggcacgtaaggttgtgaagacaactccggggaaaaaggctattatagatggaatactgaccttgccaatggtacttccgccgacagtggctggcttctttctgttactgatcttcagcaggagaagaccgtttggaatctttttatttgaaaattttggaatcaaagtagtacagacatggcttggatgtatcattgctgccacagtaatttcatttccgctgatgtacagaaatgcccgtgcagcgatggaacagatcgatgtgaatttgatctatgcaggaaggacacttggcatgtctgatacagaaatcttctggaaagtagtgatcccgaccgcaggacctggaatcgcatccggaacgattcttacatttgccagagcactcggagaatatggagcgacatctatgcttgccggaaatattccgggaaagacaggaacaatctcgcagaagattgcaatggtcattcaggacggagactatatgacagcgggcgtgtgggttgcgattgtcatggtgatcgcattcctggtgatcttcctgatgaatctgatctcgggcaagaaaatgaagaatgtcaagaggtggtaagagatggcgatagaagtaaagattcagagaaaacggaatacatttgagctgaacatagattttaaaagtgattctaaacgaatcggaatcctcggcgcatccggatgtggaaagagcatgacactaaagagtattgcaggaatcgagccgccggagagcggattgatcaaaattgaaggaaagacagtttatgacagcgaaaataaagtgaatttaaaaccgcagaagcgtaacattggctatctgtttcagaattatgcacttttcccgacaatgacggtggaaaagaatatcgccgccggattaaaaggaaaaaagcaggagaatgcaaagcgtgtgcgtgagatgattgagaaatttcagctaacaggactggaaaaacgattcccggcagagctttccggaggtcagcagcagagggtagcccttgcgagaatcatggcttataaaccagatgtgattctcttagatgaaccattttcagcacttgatatgtatctgaaggaccgtctgcagcaggaattacaggaacttctcgaagattatgagggtactgtgatcatggtgtctcacagcagagatgaagtgtaccggttcagtgaagaactgctgatcatcgaccaggggcagattgtggcagcagggaagacgaaagaattgttccagaatccgcagagaaaagaagcggcacggctgactggatgcaagaatttcacaagagcagtttatgtggatgagcataccgcagaactgacagactgggggattacgttgtgtacagagcaaagaaatatcccagaaaatatcaactatatcggttatcgtgcgcatgattttgtcccgatctggggagaaggtggaaagaatcagattccatttctattagagagtaaggcagcactccctttcgaagataattattatctgaagcctgcaaatgaagaggcagatccgcctgtgatctcctggtttgtacagagagagaatcaggagaagatccgggaaaaaggaatgccggatgcgctggagctggtggaggaagaagtgctgttcctggaatagcatcttcccatatagatgatttttgagtgaatcgttacgttttgaaagaaatgtaaaaactccttttcaggatatttacatcagggaaaaactagtatataataagcacgtttttcgaaaacacatcccgtccgttggttacgaaacaattcttgtgaacagtaatcaacggacgggatgtgttatgtatgtagtcactgataaatacggaaaaggaggagcaaaatgaaatcagtacagaatgatatgactgttggaagcccaatgaagatgatcttaagttttacatttccaatctttctgggaaatgttttccagcagttttataatatggcggatgctgtgatcgtaggtaagttcgttggaacgaaagcgcttgcagcagttggaagcacaggaacaatcatgtttctgatctatggatttgtagttggaatgacagccggatttactgttctcacagcgcagaagtttggcgcaggagacatgcaggggatgcggcgcaccgttgcgggggcaggaatcctctcattcttgatcggactgtttcttacggttacctttatgttatttatgaaaccgctgttacatctgatgcacacgccgtctgatatctttgcagatgcatataagtatattatgatcgtcagcggaggaatcctggcgcagatgctttataacttgttatccagtattttaagagcactgggaaacagtaagattccattgtatttcctgatcatcagtgcgttgctgaatatcgtgttggatctggttttaatcattgtatttcagatgggcgcaccgggtgcggcaatcgcgacggtagtagcacagggcatatcaggtgtactctgtcttatttatattatgtggaagattccgcttcttcatctgaaaaaggaagactggcatgttggcgggcagatttgcgcgattcagttaaagatcggacttccaatggcattgcaatattctatcacggcaattggaactatgatggttcagtctgccctgaatattttgggatctacgcttgtggcggcatttactgcggcaagtaagattgagcaggttgtgacacaggcatatgtagcgatgggaacaacaatggcaacttacggagcccagaatatcggagccggaaatgtaccaagaatccgtcaaggtttcaaggcgtgtacgattcttggtatcggttactctcttgtagcagcaacatttatcatgacagtaggaaaatacatgacctatctgtttgtctcagaggatgtggatattatcatgagttctgtggatatctatctgaaatgtatcggacttttcttcattccgcttgcaattgtgaatatctacagaaatggaattcagggactcggttacggactgctgccgatgatggccggtgttgctgaactgatcggaagaggtgtggtagcacggatcgcagcaagagagagaagttatcttggtgtttgcctggccagcccggctgcatgggtgctggcaggaggcctcctgatcgcgatgtattattatattatgaatgttcatatgaagaagatgtttggggattataatcagaaggtctgattattcacaatgtgcattgcatcgcggctcgcattcaaccatttggatttctcagtttcaaagcgttcgaaaagccaggcaatagcttcatccattccctcatcggagagcggaaatgtcttttgttctttctcttcttccggtgtatcttcaaagcaccacggttctggataaatgaatacggtgaaggttgtgctgctttttccgtcatctccgcgaaagaaatagcgcattccgtgatgtgtacctgaaaatggttctttcttaagtcccccgtaaggaatcagttttttatcaatcatagtaatacaatgtcctttcgaaaaaagtaatttgttttgttattgcgtttttgaaaaaaggaagccagaagtctggcttcctttttattatagtggaatgcgttttcttctgcaagaaatgatttattccatagcttttttggcaaattcagttgtgacaagtttttcataaggagcgcgtgaatccagttcaccggcactttccaaaatatcctgaagcagctcgaaactctctttttcaaatataagatctgctttccaggtgtcctgtgcataataacggtttacaatcgctgtgatggttttaagatctgtttcaggaaattgaggggcaatcacggaagcaatctcctctggcgtgtgaatctgaacaaaatccatacctttttgaagcgcatttgtaaaggattggataatctcaggatgtttgtcgagataactcttctttgcgctgtaggcagtgtaaggaacatagccgctgtcagtaccaagtgaggctacaacatatccttttccttccatttccaaagcggttgcacttggctcgaattcaacagtaaagtctccacttccctctgaaaaggcggcagcagtggaaccaaaatcaattccctggttgatgttgaggtctgtttgtggatcaattccatttttctttaaaatatattcaaataccatttccggcataccaccttttctaccaccaagaacatctttcccctttaaatcagtccacttaaaatctttcatctcttctctggcaacaagaaaattaccggcgcgctgagtcagttgggcaaagttgacgacagaatcgttagcaccttcgttatatgtgtagatggatgcttctgatcccatgaatccaatatcagcttcaccggagatgacagcagtcattgtcttgtcggctccaaaaccagttacgagagtgagttcaattccctcatcttcaaaatatccattttcaatggcaacatacataggggcatagaagatagaatgggctacctcgttcaatgtcacagagacaggagcagaactgatatctgatttggttgtgttggagccggtttctgttgtgtcgattttggaatttgcatcattatctttggaagaatcagaaccgcaggctgataacagtccaacagtcagagcagaagcgagtattacggaaatcaatttctttttcataaatcctccagagtgatataagattctcgtttaaaatatgcaagaaaaaagaataggtgtcaaattctactccaaaggggtgttcattttggaaaatatcctttatgcttagtgtaaacagaaagtaggtgaaatataatgaaaacaagagaagaagctgctgcctatggattaactttcccggacagctatgaagacaggccttttaaagaccaacgatggcaggtgatccgtgtaaagccgggaaaaaagatatttttgtggatttacgaaaaagacgaattgatccatttgaatgtaaagacggatccgagatggagggatttctggcgtgcagcgtatccatcggtaattcctggatatcatcagaataaagagcattggaacacaattattctggatggatctgttccggacaaggatattgaacggatgatcggtgagagctatgatcttgtgacagacagtcctacaaaaagaatttatgaagctgtaaaacggattccaaaagggcatgtggcaacttatagacaggttgcgaagatggcaggaaatgaaaagatgtcaagagcagttggaaatgcgcttcataagaatccagatccagatcacattccatgtttccgtgttgtgaatgcgaaaggcgagcttgccggagcatttgcatttggcggagcagatgtacaggcagagcttttgagagaagacggtgtggaagtagtagatggaaaggttgatctgacaaagtatcagatggcggatctgatggaagagtaagatagtactgtttcttttgggaaagatagtgtataatacttacgagtgattgctgttcgcaaagtactgcgaacagcatctttgtatagtgcaaagagcaggaaagaatacatcattatggtttcgcttttgaaggcaaaaaagtcctgatcggataagaaatggagaaatgaatgaaaattaagaaagtggcagtcctcggtgccggagcagtaggctcttatgtaatctggggattatcgagcagaaatgacatagagcttggagtgatcgcagaaggagaacgagcagagagactgaaacagaatggatgcacaattaacggaaaaatataccatcccgaagtatggaaccccggagaaacagacgctgtcgatttactgattgttgcattgaagtatggctcactttcggcggcattggaaagtattcagaaagcaaccacggagaatacggtaattatgagtctgatgaatggggtagacagtgaagagattattgcagaaaaagtaggagtggagcatcttcttccggcagtgatcaaggtcgcttcgcataaggaagaagatggctatcattttgatcctgagacaacaatcggaattatttttggcgaacttactgcaccttacgatagtgatcgcatcagggcaatcgaagaactgtttaaggataccggaatccatttccgggcgacagagtatgcaagagaagagatgtggagcaagtttcggctgaatgtctgtaacaatctgccacaggcaattctcggcgcgggagttggatgttaccgtgacagtgtgcatatgaaggtaatcagtgatggactgaaaggagaactggaagcaattgcacatgcgaaaggaatcgatctgagtaagactgaggcgtcttccgggcgtggaagtgcagtaccgccatctgcgcgttattctactttgcaggatttggatgcaggaagacacacagagattgatatgttttcaggtgcactgatccgtatgggaaaggaacttggaattccgacaccgtataatgagtatacatatcatatgattaaagcactagaagagaaaaatgacggacggtttaattatacaggagatgaagaaccgacctggtcaaaataatagagtgattcatgacaacagaaaggacaataagaaaatgaaagaattatacgaagcaatcgaagcaaaaattaaagcaagtggttatccgagagcaatctccggagaagatgtatacaatgacatctgtgatcagattgacggaaaagagaatggaagttatgtattgttatccaagttcgaagatgatgtgatttttgagtatcatatcacgattcaggatgaagatttcaacctggggattttgacaatgcgaacaccggaaggcgtgtttgagacagattttgatgcggaataaagggggaatttcagacgatagaaaaagcgaaatgagaggaaaaacctttcatttcgcttttttgaaattccgaaagattctcattgacgtgagtttctaaagcccaaactcgtttaataacttcttctgatattctctgtctactgctgccttgagaatctcatcacttctattaagctcagataatttaagattcagttgattgattctgctttctccaagagcttccccttcttctcgtttttcatctaattcatctttcattaattctaataacgcattacacatatctctttttccctcctttagtcgattctcgtttgcttttactataatctccataacagcctgatacagctgattctctttgttctttttataatcctccaaaagctgccttgtgacagacatgtcttccagtgtatctgtcaaactatataaccagagatttctctccggtgacaatcgatttgttacaagaatctgaatcggtaagatatctccaattacataataaatcccttcttccggattatcaatagtgtagtgacgtacttctttttaatgatcaacacatcaattgccattggctttgaacttaatagatattcccgctcaaactttaatttttccgtttcttctctgaattcaatctgcaagtctgcataaaatgcaggatgccactgaagcagctttccatttgccggtttttgtttttccggcaattgctttctcttttgtttcatctaagagacctccttatgtgattttcacagaagttctctctatcagaaaacctctgctttaaataatggattttaaaagcatgaatttcctgatttgacaggtaccatttacctgtaatgaaatctttatatgaatttagatgttttagaaaatatgctttgaaataggatagcatatttacatgccgatgtaaatactgaaatgccgaagatggtaggtatgataaaatcagtataaagtcaacccaacaaaaccaataaaaaccctcttgtgcaatatgtttatccaaaatcttaaaaaaatataaaatttatataaaatccttcttgaatttagcatggtgaagtgctaaactcttaacataaaaacagagtgcgatctatttattgatgagtgcatctgaatcatagttaagaaagaaggaaagaaaatgaacggagttataatgatggtcattgccatcgttgtattaggtggaggatatcttctctatggaagatatcttgagaagaaatggggaattgacccgaatgcaaagactcctgcttatgagctggaagacggcgtagattatgtgccggcagatacgaatatcgtatttggtcatcagttcgcatctatcgcaggagcaggcccgatcaacggaccaatccaggcagcaatctttggatggcttccggtacttttgtggattctgatcggaggtgttttcttcggagcggtacaggattttgcatctatgtatgcttctgtaaagaacaaaggacgtacaatcggttatattatcgaagagtatatcggtaaacttggaaagaaattatttctgttattctgctggttattctgtattcttgttgttgctgcatttgcggatgtagttgcaggaacattcaacggattcgtagccgatgatgccggagttgtaagcaaagtagcagcaaatggtgctgtggcaacaacatccatgcttttcattgtagaagccgtagcacttggctgcattttgaaatatgcaaaactgaataaatgggttaacacagctattgcaattgttatgcttgttgcagccgtagcacttggactttatttcccaatgtatctgacaagagagacatggcatatcttgatctttatttacattctgattgccagtgtcgcaccggtaacaatgctgcttcagccacgtgattacctgaacagttacttgctgatctttatgattgcagcagcaattgtcggagtatttgtagcaaatccatcctgtaacctgaaagcttttacaagcttcaatgtagatggaagttatatgttcccaattctgtttgtaacaattgcatgtggagctgtatcaggattccattcactggtatcttcaggaactgcttctaagcagattaagagtgagaagaacatgctccctgtatcttacggagcaatgatcatggaaagtatgcttgctgtaatcgcactgatcgcagttgcttccttcgctgatggcgaggcagcagcacagggactgacaacacagccacagatttttgcaggagcaattgcaaatttccttgaagtgatcggcttaccgcattcacttgtatttacactgatcaaccttgcagtatcagcatttgcattgacatcacttgattccgttgcacgtgtcggaagactttctttccaggaattctttatcgatgatgacacagatatggataatctgccattgtacaagaaagtagcaaccaataaatatttctcaacagttattacactggtacttgcatacttacttgcaaaggttggatatgcagaaatctggccactgtttggatcagcaaaccagcttctgtcagtacttgcactgattgcatgtgcagtattccttaagaagacaaaacgccagggagcaatgctttggattccaatgatctttatgatggcggtaacatttacagcacttggaatgacaatctgtaaactgggaggtcagtttatgacaacaggtctgagccttggaaatacattacagctgatctttgctgttctgcttcttatccttggagtaatcgtagcaattcagggaattaaaaagcttacagagaagaaagaagctcaggcagataaagttgaggagacaaccattctggaataagcagaatagttaataaagagtaagagacaagatcttcatgcagacttaaaatgtttggcatgaagatcttttttctagttctatttaattgtactcaaatagaaacaggttaaagtatagaaattttacattcgccgggtgtatactaagtcgtaatgtaaaaagacaatctataagtagtaacaagataagggggagtataaatgaacgcgaacataaatcaacaacatatgttcagtaacaagatgatccgtgctcttttagtaccaatcatactggaacagttattgaattccatcatgggtaccgcggatacgatgatggttagtaatgtaggatccgcggcaatctcagctgtatcgctcgtggattccattaacatattggtgattcaggcattttccgcattggcagccggaggtgcgatcgtctgcgcccagtacattggacaggggaataaagaacgggcaaatgagtctgcacgacaggtactatttatcatcactcttatatcagtagctgtcagcgcattttgtcttatttttcagaaaccgttacttcacctgatttttggagcagttgaagcagatgttatgagagcatctgaaatctatttcttctacactgcattatcatttccgtttattgcggcgtatgatgcagcggcatcgatcttcagggcacaggagaacacgagagatccgatgctcatctcaatggtatcaaacgtgatgaatattgtcggaaatgcaattatgatctggggcttccatatgggagtcgcgggagctgcactggcaactttgatttcacgtattttctgtgcggtcgtagtattggcagagcttcgtctggatcgtcagccaattgtggtacgagattatctgaaaatccgtccggactggagaatgatccgcaggattcttggaatcggaattccatccggtgtggagaacagtatgttccagttaggaaagttggcgattcagtccacagtatcaacacttggaacaacagcaatcgctgcgcaggcaatgacgaacattctggagaatctgaacggaatcggtggtatcggagtcggaatcggattgatgacaattgtaggtcaatgtctgggagctgaccggaaggatgaggcagtttattacatcaaaaagctttgcgtgattgctgagatcgttatggctgcgagctgtgtgattgtttttgcactgacgaaaccaattacgattctcggcggtatggaaccggagagtgcgaagatgtgtttccatatggtaatgtggatcacaattgtaaaaccgcttgcatggattatgtcgtttatcccggcatatggcatgagagcagcaggagatgcaaaattttccatgattacatcctgctgtacaatgtgggcatgcagattctgcctgtgtgtatttctgatccgtgtaatgggatttggcccgatgggagtatggatcggaatgtttgcggactggacggtcagaagtattattttcacctggcgattccacagcagaaaatggctggagcataaagtgatttaaataagaagagaaatctgaacaaaaagagaaatccaaataaaaatagaaacagcagggttactgtcgggaaagcattttaataataatgcttttggcagtagccttgctgtttcttatgtctgctattttttaaaaagaagttttagtatatttatagatttatgtctggtatatgattcctgaaaattactcttcaggtgcaagctctgttgtctgcttctttggaggcataaccagtgagaagataaggaatgcgatcaacgcagcaaccagtccaggtacgatcggctgattgaagtgcaaaccgaacagatttcctttggaaacatgctccagatatactacaacaatagttccggcgatcagagaagccatggttcctgcctgggaagctcctttccagtaatgtccgagaacatatgggaagaaagaacctgcggcacgaagggtgaaggcaaacatcaggattgtaacaatacttgaagtattaaataatgcaatcagagtagcaaaaacacctacagctgccattgtaacacgagttacgatcatgatctctttatcagatgcgctaggcttaatcacaatcttgtaaatatcatttgcaaagatcgatccggcaccaagaaggtctgagtcagcacttgacattgtggcagatacgatacctgcaaataacaatccgcagataattgccggcattgcttccatagcaagaaccggaagtgcataacgggcaccaacatcctggaagtccgcagcattgaatttgcccatgttgatcagtgcaagtacgatgattcccataagtgtcggaacaaaagcgtagataaagtttacaattgcagcaaggacagatccctgtcttgctgcttttccgtctcttgcagcgtaatatctggatacagcttcctgtcctacagtaaatgtagcaacatacatgattgttaaactgataacatccattacattataacctttaaacatgtcaaatgtttcagcaggaacattagctacaacattgtcccatccaccggcaagattcattccaaatggaagtgcgatgatcattccaatcacgatcaggaatacctgaacaaagtcagtaagtgtaacactccaaagaccacccatgatcgcataaattgttacaacgacgcctacgatcagaacggctgttttataattcagattcagcatagtagacagaataacggatgatgcgataaactgtccggctgtcagtccgatcaatggaacgaacatgatcaaagatgtaatgattcctgaaggttttccataacgacggcggaaatattcaggaacagttttaaccatcgcagcacggaattttggtgcaaggaatgtaagaatcacaaaagcgaatcccattgtgataatgtaccatgcggcactgagtccgtgactttccataccctgctgaacaacaccgagagaacttcctccaccaatctcagtagcagcaagagttccggccattaaaaacggtccgagtcgtcttccggcaacaacgaagtctgtgttggattcaatctttttagatgacagataaccgatcaataacataacaagaagataaataacaacgacagcggttacaataatgtttgactgcataaaatatccctctttcctttagtcaaatttgaaaaaggtatcaggaaatagcgaaacctgacacctatgttcatacgaataattataccataaaaactttcacacgcaacctgaaaagagaaaaaacttattgaaaattatcaatatttccggaagataatcgattggtatggtagatgttaacaaaaataataaaaggcgagaggacagcgtgaaaaagaacattttttagggggtggacatttgacgtttctattattacaattataataatcgacagaaaagaggaattgtatatgacacagatagatgcgttaaaaacagatgaaatacagaattatgagatagaacatcaggaagaagtgcgccgcctcgcaggcgagtgtatggtaattttggaaaatgacggagtccttccacttcaggctggtacaaagaagattgcattattcggaacaggagcaagacatacgatcaaaggtggaacaggatccggtgatgtaaatgtacgtgaaaacatttcgattgcacaagggcttgagcgtgcaggatttaaatttgtaacagaaggctggctggatcagtatgacagactttatgcggatgcgcaggaagcgtatgcgaaaaagttaaatgaatttacagagaaaacaggaaaaccatcgatgctatatgccttcgagaccccttttgaggaaccggaacagccggagattacagaagcggatgtaaaagaagcggatgcggcaatttatgtaatttctagaaattccggagagggaaaagaccgcagggcagagaagggagattattatctcagcgacagagaacttcagaatatccgttttatgacagaacactataagaactgtattgttcttttgaatgtaggtggagtcattgatctgacttcattgaaggcaattgaaggtgtacaggcaattatgcttgtgggacagacaggaaatatgggaggttatgcagttgctgatgtgctgactgctaagacgattccttcaggaaagctgactgatacatgggcaaaatcttatgaggattatccatcctctgcaacatttagccacagggatggaaatcttgacgacgaatattacagtgatggaatctatgtaggatatcgttattttgatacgtttggtgtgatgcctctatattgctttggatatggaaaaagctatacagaatttgaaatgaaaacaatcaatgtaacagcagatgaaaagcaggtacaggttgaagttgaggttacgaacattggtgataagtattctggaaaagaggtggttcaggtttattattccgcaccggatggaatcatggagaaaccaacacaagaacttgcaggatttgctaagactaaattgcttgcgccgggagaaaaagatgtcgtgacaatcacatttgcaacgacagatatggcatcttttgatgcatatgatgcggcctgggttatggaagaaggggaatacacgatccgcgtaggaaacagttcacgtaatacggaagctgtggcagtcatcgaccttgatgagcaggtgacaacactccaactgaaacgtctgatgcgtgatacaattgcagtcagagagcttcaccatatgattccgattttcgatattgaatttgatttcggtgttccggcgattccgtttagaattatgcttcaggcagagaactttaagaaagaacttgtagaatatgaagtgatgcgcaggacacttatggataagaggaaagatgaagttctgacgttggaagatgtaaaagcaggcagcgcgactctggatgaactgacagcgcagcttaccgtggaagaaatggcagaactttgtgttggaacagagagaagaaatggcgacggaaatgtaattggttcagcatcctccggtgtgccgggagcagcaggagacaccacttccagtttacttgaaacacgaaaagtgccgaatcttattcaggcagatggaccggcagggcttcgtttagagacaccttgtactgccattccaatcgcaacaacactggcacaatcctgggatatgaatctgattcatagaatgggagagcttgtcggagaagagatgaagcagttacatgtagatctatggctcgcacctggcatgaatattcatcgtaatccgctttgtggacgaaacttcgaatactattctgaggatcctgtattgacaggtctttgtgctgcaacagagacgaaaggtgttcagtctcaaaaaggaaagggaacaacaatcaaacattttgcaggaaataatcaggaagacaatcgtatgtttacgaatgcacatatcagcgagcgtgcgctgagagaaatctatctgaaaggatttgagattgcggtaaagacagctcagccatatgcgatcatgacttcctacaatctgatcaacggagttcattcagcaaacaactatgacatgctgcagaacatcgcacgtgatgagtggggatttgaaggtcttgtgatgacagactggtatacttcacaggatacaacagagatgggaatggtatcaccatccggaaaatatagtcattctagcagtgtacagtgcattaaagcaggaaatgaccttcagatgccgggatgtcagcagaatgtggatgatatcgtagaagcagtgaacgaaggaaaagaaattaccaaagcagatttacaacgctgtgcgaaacatattttaagtgttgcacttaagacaatgtaaaaccacctcggtaatatggaaattgagagtctttttcgtattactcaaaaattaataaacaatatcgtataagatcaagccttttgtgtcgcaggatgcagaaggcttttcctttcctttcaggatcgcattgatacattcgacgggtcttttccctatgccgatatccaaaagcgttcccagaataaatggagccatctgatagagaaaatcattggctgtcatacgaatataaagcgtagactcttctgtgacaaaagtaattgtttttatttctttttcggttcctttcttttttcgaatcgaagagaaatgtttaaaatcatgcgttccaagtaatgagtgggcagcggtttccataagaagaatatttggaagttctgctgtttgttcaggtggcagatcaaataatgaatctgataacagatcagttaatcgaccgcgatagtttttgtggaacaggtcatagatcggtgataaatccatggcatattcataagtgatctcgcgtgcatttaagtctgctcgaaagcgttcgggtgttgatactgcatctaaaacggcaatatcctgtggaagatactggttcagaacagttttaaattctgcaggagtcagttggctttccgtaagaaaattgactgtgagattccgagcatgaactcccggttctgttcggactccggaaaataaagtgacaggagttcctgttactttttctaatacattttcaattttataagatactgtgcgatcattgtggtctttttccgggcgtttccaaccaagataacgtgtaccgtcatattggagtgttaatttaatattctgcatatatcgttctccatttataaataatgtctgtttccagacaagtcatcctttgtattttaactgatgcagatggaaatgtatagagaaaagaagagaaataagactgcaaaggcgaagagagtgattctgattttatttaaaatgtttccgaaagatatttttggtcatttccatcatgcggtcaatttgattttgttcttctttgcttttaccttcttttaatacttcaagaattaatgaaacttcatccggattgaaacgaagtccctgtcggtttgcatttgtgataagtgcgagcataaccggggcaagttcatttccagattttcctttcgtctgtttcgcggctgtcctgatcagttccagcttgagcggatcgatcgttttcattgcaggatggttcatccagttttccattgttaagatctcctttcggtgagttattgtttatagtgtcttctggctcttcatcagaaggtggagcagatgaaaagaattgtgtaaacatatctgccatagacatcatctcttttatgtttttgaaagtagaaaagagctgtttttcttctgatgtgagataaggtgacagatggtcaaaaatagaatctgcgttgtcttgaaaaagactttctattcctcgtccagaagaaaagtcacaggcagaaagtgcatcataactgacaggagcctgatggtgaagaacattttgcagttcgatgaatttaatgaagacggcaagcatgctctgtgtagctggcgggaaaagaggaaggaaaagtttcagcatgcgaagtccggaagcagttgcttcgtcaaagggggtcataggcgtcggtgttttcaaaaaaataaaccctcctgactttcagctgaactgatacatatatatgaaatgcagaaaaaatatattcctgttcatgaatatagatgtgtgaaaaatcggattatgcgtatactgaattaaagaccttttgtaatcaggggcatatcttaataataagaagaggaaaggaaaacgaaaatgtccagaaagttaattattgatgggaatgcagtatatgaaattgatgagaagtgtatgttaaagaaaaagcttggagaactgaaagaaaagaagataacatcagacgagaagagagcggaacagagtgttgttaccggaaaaccgaatcgtttgaaaagataagccagaaggggcatgcggtttttccgcatgccccttctgaagtggaagaaggaacagatatcagcatccgccacagttgcagccattaccgcaaccgccgcatccgaagccattattgccccatccgccgcagcagcaaagaagaaggatgatccacagacaactgtcattgccgcagccattaccacatccgccacaaccattaccaccccagccaccgcagcagcagaggagaaggatgatccacaggcaggagttattcagtccgcatccatttccgtttccgccacagccgcagctgtttgcacatccgttgtcacaaccgcatccgcagtttgtagctgttaattcactcattgttaaatcctccgaaagattttttgatttacaatgttatagtatgcggagaaaaagaaaatgtgagatgagaaattatttgtagtgataaagatgtgaagtggcaaaaattattcgagcagccgggaaaaatctaaaattccccagccggattcagttcccggaatctgtacacaggaagtgtgaagttttaatttgacttctgcattggtgagaaacgggtattttgaaagaagacaggcaattgcaccggaaacaacaggagcagccatggatgttcctgttttggaaagataaggcggagcatttggaaattgagagtaaaaggcattgcagcttacaattcctgtgccgggggcaaaaacatcaggtttgacaatgcagtcatctgtaggaccgcggccggaataattgagaggatgcctttgggtgtggatcagaggaaaagtgtcgggaacaccaacagtgataacttttgggctgcttccgggaactgtgacggaaccgggagcaggtccgtagttgccggcagagacaactacgacgagcccaagatcccagagggattctacagcattcaataaaagaagtttttgatgaatggaaagatccggtcgtgtacctacagaaatgttaatgatccggatatggaattgcgtgtagatatcacggatccattgaattccatttatgacatttttgatagatccgtttccattctgatccaatactttcccaataataagattgcagaagggagcgattccggcataagttccggaagagagaagtccgcttcccgcaagaattccggctacatgggttccgtgtccactattgtcgatgagaggggagaaatgagagaaagaaaaaagaactttttcggaagaaccagtggtactggaaaaatcccgaaaagaaaggatacgacctttaaaatcaggatgaggagaaattccggtatcaagaatagcaacagtgacattttgtccgagaaatttgtgttcctttgtgtccggacaccagtagtgaatggattgttttacccatttcatgaaggaaaagcctttgttttttctttattatatgcctgatactaaattagtgataaagatgtctacactgagatgacaaaacatccgtttgccatgtggtaagctcaagagcaagctctttcgcttaagggcgtccgccctatgataaaaaagttgccggctctcttatataagcgagcttataacgtgagccatcaacttttttatcgcatggcaaactgtaaagaaaaaacacttgacaccatcttgcgtttcgtgtatgatagcagaggtgaagataatgaataagtttttagagcaggcattattgtttgatttctacggggaattgcttacagatcatcaaaaggagatttatgagcagttcgcgctggaagatctttcgctcagtgagattgctgaaatgaaggggatcagccgccagggtgtacatgatcttgtgaagcggtgtcagaagacactggaaggatatgagatgaagcttcatcttgtagagaagttcctttccgtgaaggagaaggtcagtaagattgatgatacacttgcagagtgggaatgcgagaagaatgacccggaagagatggtgaagcggatccgtaagattgcggatgcgatcatagaggagttatagaatggcatttgacagcttaagtgaaaaacttcagaatgtatttaagaacctgcgaagcaagggaagactgacagaggatgatgttaaggcagctctgaaggaagttaagatggcgcttcttgaagcagatgtaaacttcaaggttgttaagggcttcataaaggatgttcaggagagggctgttggtcaggatgtgatgaacggactgaatccgggacagatggtgatcaagatcgttaatgaagagctggttaagcttatgggatctgagacaacagagatcaagcttcaaccgggcagtgcgatcacagtgatcatgatggcaggtcttcagggagcaggtaagacaacaacaactgcaaagcttgcaggaaagtttaagttaaaaggtaagaaaccacttctggtagcatgtgatgtttaccgtccggctgcaattaagcagttggagatcaacgcagagaagcagggcgtagagatgttctccatgggagacaagaataagccggcggatattgcgaaggcagcagttgagcatgcagcaaagaatggtaacaatattgtgatccttgatactgcaggacgtcttcatgtagatgaagatatgatggcagagcttcaggagatcaaggaagctgtggaagttcatcagaccatcctggttgtcgatgcgatgaccggacaggatgcggtgaatgtagcaagttcctttaacgataagattggaatcgacggtgtgatcgtcacaaagcttgacggagatacacgaggcggtgctgcattgtctatcaaggcagtgacaggaaaaccgatcctttatgtcggtatgggagagaagctttctgatctggagcagttttatccggacagaatggcatcccgaattctgggaatgggagatgtcctttccctgattgagaaggcaggcgctgagcttgatgaagagaaagccaagaagatggctgataagatgaagaaagctcagtttgactttgaagattatcttgacagtatggaacagatgcgtaagatgggcggtttgtccagcatcatgggaatgctgcctggaatgggtaatctcggaggtaagatgcctgatcttgattccgaagagaatgagaagaagatggctcagatggaagcaatcatctactccatgactttggaagagagaagaaacccggatctgctgaatccatccagaaagcacagaattgccaagggtgcaggtgtggatatcgcagatgtgaaccgtatggtaaaacagttcaacgaatccagaaagatgatgaagaaacttcctggaatgatgggtggcaaaggtggaaaaaggggcaaattcaagcttcccttttgacatataaatgaaacaataacaaaaaattaagaaaaattatgaggtgaaaaaaatggcagtaaagatcagattaaagagaatgggacagaagaaggctcctttttacagaatcgtagtagcagattctagatctccaagagacggaagattcatcgaggaaatcggaacatacgatccgaaccttgagccaagcgcaatcaaagtagacgaggaagcagctaagaaatggctcaacaatggtgctcagccaacagaagttgttggaaagatcttcaaagcagcaggaatcgagaaataatcgaatctgtatgagtaatgtctgtagctgagtgatcagctgcagataaataacgatgtctccgcggagggcgagtatcatgaaagaattagttgaagttattgcaaaggcactggtagatcagccggatgaagtctcagttactgagaaaaaggaaggcagaactactgtactggaacttcatgtagcagatggcgacatgggtaaagtgatcggtaagcagggtcgtattgcaaaagcaatccgttctgttgttaaggcagcagcaacaaaggaagacaagaaagtcgttgttgatattgtttaagaacagtatcaggacgaaagaaaaaagtaacagagtcattgcttggtaaagcagggcttaaaaaagggacagccttcataaagaagagactgcccctttctttttacgagagcaacgagtcaaagtctgtgcttgcacgagaccttggcgactgccgcgataacttgagaaactcgcgaagtgtgtttctcatagtttcataagaaaggaatcaggaatggaacaatttcttcaggtgggagtgatttcttccacacatggtctgcgtggtgaagttaaggtattcccgacaacggatgatgctgcgcgttttcagacattgaaaaatgttgtccttgatacaggaaggaaaaagttggatcttgagattcagtctgttcgttttttcaagcaatttgtaattgtgaaattcaagggcattgataatatcaatgatattgagaaatataaaggaaaaagtctctttgtaacaagagaaaatgctgtcgaactggaagagaacgagtattatatcggtgatctgatcggtatggaggtctatacagatgacagtgaggaacgctttggagtactcaaagacgtgatggagacaggagcaaacgaagtgtatatcattacttctgagaatcacggagaagtgctgcttcctgcaattcatgagtgtattctggatattgatgtagaagcgaagaagatgaaagtgcatctgatggagggattactgtaatgaatttccatgtattgactttatttccggagatgatcgagcaaggtgtgaatacaagtattacaggccgtgcgatcaacaatggacttctttcgatcaatgcagtgaatatccgtgattatgcatttaataagcataacagtgtggatgattatccatatggcggcggtgcaggcatgttgatgcaggcagaaccggtgtatctggcttatgaggctgtgaaagagcagatcgacaagagaaagcaggagaacatcaagtcggaagaagtcacgtcaacggaaccagcggattgttctgaagtgcgcaacagtgatttgcaggatgaaaattcgaagaagcgtccactgcgtgtagtctatctctctccacagggagatgtatttaaccagaagatggcagaggagatggctcaggaggaagaccttgtgttgctttgcggtcattatgaaggaatcgacgaacgtgttctggaagaaatcgtgacagattatgtttccatcggagattatgtactgaccggaggcgagcttccggcaatggtcatgatcgatacgatctcaagactggttccgggagtgcttcacaatgatgtctcagcagaatttgagtcatttcaggataatcttctggagtatccgcagtattctagaccggaagagtggagagggaagaaagttccgcccatccttctgtccggacatcatgcgaatattgaaaaatggagaagagagcagtcaatccttcgtacaatggagcgacgcccggatcttctcaaggagagcaatctgacggataaagagaagaaatggatccgccaggtgaaacgggaacgcaaagaagcagaaaaaatgaaatagggacttgaaaaaagcccggaaatatggtaaactacaaaagttgtgaaaagaagcgcgatggtcctctggcacaaaagtgaagtgttaagaacgtcaaatattaaggaggtcacacaaaatgaacgaaatcattagaaaaatcgaagcagaacagttaaaggagaacgcacctgaatttcatgttggtgatacagtaaaagtatatgccaagatcaaagagggtaaccgcgaaagaatccaggttttcgaaggaacagtcctgaaaagacagggtggcggagcaagagagactttcacagtaagaaagacatctaacggaatcggtgttgagaagacatggccggtacattctccacatgttgagagagtagaagttgttcgcagaggtaaagtaagaagagcaaaactgaactacttaagacagcgtgttggtaaagctgctaaggtaaaagaattagtaaaatagtaactatgagagggacaattacagaacttgtatattgtcccttttcttatagcttacgcgagcaacgagccaaagtccgtgcttgcacgagaccttggcgactgccgcgataacttgagaaactcgcggagcgtgtttctcatagttgggaaggaaaataaggaacctatggggcagaatctgagttttcgaaagaataacagaagaaagaaaaagaagaagccgcagatgaagaagaaaaaccatctgaaatttacaaaccgaagtaagaaattaaagtttgaaaagaagaattatcatataacaaaaaattctttgattctcgcaggagagatactatgtgtttgtctggtggcagtacttttgattgcatttttcgggcatcgtgtaagcaatgcaggagatgccatgagtccggcaattgaaaatggagaggttgttcttgtagatcgtctgatcgtggatatgaagacaccttccagaggaactgtggtggcatttcgaccagacggaaaccgcgaagttcatcttttaattagaaggattgtcggtcttccgggagagactatccaaatcaaggatggaactgtttatattaatgggaaagagcagaagaaacatattcatgtatcagagataaaagatgcggggatagcttctgatgagataaagcttggcaaagacgagtactttgtgctcggagacaatgaagagtcaggcgaagacagcagatctgagacggtcggagtggtaaaggcagatgagatctatggaaaggtctggttcaatgtaagctccggggaacatttcggatttgtaaaaagataaaatagaatgaaaaaataacaggaggaatgcaatgcattttcagtggtatcctggccatatgacaaaggccagaagaatgatgcaggagaatattaagctgatcgatctgattattgagttggttgacgcaagagtgccgctcagcagtcgtaatccggacattgatgagcttggaaagaataaggcgagactgattcttttgaataaggcagatcttgcggaagacagaagaaatgatgagtggatggaatatttcaagaagcagggatattctgtcgtgaaagtgaattctaagaaaggcggcggaatcaagtcgatccagtctgtgatccaggaagcatgtaaggagaagatggaacgtgacagaaagcgtggaatcctgaaccgtccggtacgtgccatggtggtaggaattccaaacgtaggaaaatctacctttatcaatgcgctggcaggaaaagcctgtgcaaaaacaggaaataagcctggagtgacaaagggaaaacagtggatccgtctgaataagaatgtagaacttttggatacaccgggaattctctggccgaagtttgaagaccagacagtaggtttgcgtcttgcgtttatcggttcgattaaagacgagattcttcagacagaagaactggcaagtgagcttgtgaaatttttaaatcagtcatatccgggagttcttgaagagaagtacacgatagaatcttcagaagataattatgaagtgttaaggagaattgcagaaagcagacactgtctggtcagaggaagcgaattagatgtggaaaaagcagcggcaattcttttggatgattttcgtaatggccgccttggaaggcttacactggagcttccagaggagaactaatacggtatgaaagaaattataaaagaactggctggatggcttctgtatattgtgttgatcatcgcttttacctggtgtgtggtcacttttgtaggacagagaacggaagtcagtggttcttctatggaaactacactgtcagataaggatcagctgattgttgataaaatgacttaccgcttcagagatccgaaacgatatgacatcgtagtatttccatatcaataccaggacaatacctattatattaagcggatcatcgggctgccgggagagacagtacagattttatccggaatggtttatattgatgggatgcgtctggatgaacattatgggaatgaaataatggagaatccgggcattgcagaagaaccattaacactgggtgaggatgaatattttgtacttggagataatcggaataacagcagcgacagcagagcatccgatgttggtttgatccatagaaaagatctgatcggaagggcatggattcgcgtgtggccattgagtcaaattggggtgatacatcatgagtaaaagtattagcgagatcaagatagaatttgaacaggcaggagaacaacagtgggaagcactttgtcaggaatacgagacggattccagaacaggtgtaaaaaatctgacagcaagatatcggaagaagcagcaggcacttgttcaggagagagaacgcctcgaggtaatgaaaacattcgagagaaaatatgcggattatagttttatctgtggaattgacgaggcaggaagaggtcctctggcaggaccggtagtagccggtgcagtgattctcccaaaggattgtgagattctctatctgaatgattcaaaaaaactgtctgctgcaaagagagaagagttgtatgatgagattatggagaaagcggttgcagcggcagtaggtatggcaagtccggcgagaatcgatgaaactaatattctacaggcaacttatgaggcaatgcgtgaagcaatttcaaagctggcagtagaaccagggattcttttgaatgatgctgtgacgattccggagatgatcattccacaggttccgattattaaaggagatgcgaagagtgtgtctattgcagcggcaagtattcttgcaaaagtgacaagggaccggctgatggtagaatatgataaagtgatgccagagtatggatttgcaggccataaaggatatggatccaaagaacatattgaggcaatcaagaaatatggaccgacaccgatacatagaaagacatttatcaagaagtttatttaatgatatcagggttgtataaaagaaagagctgccaatggcagctcttcttaaatccgaaagttcgacggattagaagaggggaatcaggtagatgaaggatccgaaaaaagaaaagaataaccgcaagacaggtggaaactatgagcaggcagcaggtttttatctggaacagcatggctatcagatactacagtacaattatcgctgtcgcataggagagattgatattgttgcaaaagagggggagaatctggtattctgtgaagtaaagtataggactggtcctggcaaggggagtccgctggaagctgtagatgcaagaaagcagagaaagatatttcaggcagcaatgtattatctgacggaatatcatattagtgatgtcccatgtagatttgatgtgatcggtattgaagggacaaggatccagctggtgaagaatgcattttgcggatagagaagaaaggacagaatatgagtttaggattgatttataagaacgcggcacatatttttgatgaagtagaaaagaaaactccttatctggaatatccattgtttcaggagacgggcattgtaacgaatgctttttctacacgacttggaggagtcagtgagggctattattcttctctgaatctaagctttgatcgtggagatgacccggcaagggtattagagaattttaaaaggattggagcatcaatgggcgtcgctgtagaagatatggttctgtcaaagcagacacatacaacgaatgtccgtgtggttacagcggaagataagggaaaaggtgttatgcgggaacgcaattatacagatgtggatgggatgatcacaaatgttccgggaatctgtcttgtgacttcctatgcagattgtgtaccactttactttgtggatccggtgaaaaaggcaatcgggctgagtcattccggctggagaggaactgttggaaagattggaaaaaatactgttcagctgatgcaggagaattttggatccaaaccggaagatctgcttgcagcagtaggaccatcagtatgtatggattgttatgaggtcagtgaggatgtaattgagcagtttaaagaagcttttgaaaagaaatactgggaggatcttttctataagaaagagaacggaaaatatcagttgaatttatggaaggcaaatgagctgatcttcctggaaagtggaattctgccggagcatatggcaatcacaaatgtttgtacacattgcaatagtaagatcctatattctcaccggacgatggggaacaacaggggaaatctgtgtgcatttcttgcattaaaataaggaggttaaaagtatgtatctgacaacagtgaaagaacttggaacagcattactgacaaaggggacagcttttgcactggcccaaacagcaacgcagacgaataacagttccgtcaatgatgtgcttgattctgcacaggaagtaacagcaagtacagcagatgaagtgaatcgctttgtacaatattttaatgataatattccgaatctgattgcctttgggttgaaggtgattttcgcgatagtattttacctgatcggatctaaggtgatatctgttatacgtaaagtggtaggcaaatcaatggagagatccaatgcggatgttggagttcgtcagtttgttgattctatgttgaaatttgggttatacgcacttctgatctttatgatcgcaacaaaatttggcgtagaatcttcttctgtagcagcgatcatcgcttccgccggtgtggcaatcggtctggcattacaagggagtctgtcgaactttgcaggaggtatcttgattcttcttctcagaccatttgcagttggagattatattattgtgaattcagagggaatcgaaggaactgtaaaggtaattcagatcttctatacaaagatgacaacaatcgataataagacgatcgttgtgccaaacagtattctgacaagtaacagtctgacaaatgtaacagcaagaccggaacgtcagctggatcttaaagtaggaatttcttatgaatctgatctgaagaaagcaaaagagatcgtagagaatcttctactgaaggatgaagatgttattcaggatgaagagattaaagtgttcatatcagaacttgcagacagcagtgttgtgatcggacttagagcctgggtgaagacagaagcttactggacaacgcgctggagaatccttgaggagattaaaatgtcttttgatgaggaaggcattgacatcccatataatcagttgacagttcatatggcaaatcattagttattatttattagaatgataaaagtctatagaagttgattaaaaaagaggttgaaatttatatccaaacgcgatataataacaaaggtcgtcagaattgacgaccatatgccgaaatagctcagttggtagagcacttcactcgtaatgaaggggtcgtcggttcgagtccgattttcggctgaagagtaaagaccgttgttgatttcagttgtatctggaatcagcagcggttttttatatattagaaatgtccattcctaatatataaaaaacgctccgcttaggatgcgcacttataacaaacttagaacggatacgaaaaagcatcttgacgaagaaaatgaaaatggatacaatattgttacgagtttataaaaaaagatgaaaaattttctctaataaagtaaaaagaaataaaattaattcttttaaaacaagattagacagaagcagagaaatagaaaaaatacagagggtgaaaatatggcatcagtacagacaaaagattacattgtgcagttaattaaagaggagattctttcaggagttatgaaaccgggagaagagctggcacaggaagcacttgcagagcgtcttggtgtttcaagaatgccgatccgtgaggcattacagaatcttgttcaggagggatttgcggtacgtcttccaaaccgtcatatccaggcagtagttttgagcgcacagcagattcatgatgtatttcatgtgattgcagcgatggcagcagagaatacgatcttagttgcaaagaaagagcagatgcttcgaaggaaaaatgtggaacaaacgagtcagacagaattcgaagaagatggacagagcaagcttttccttgagcaagagattgagaaaactccaagcgagcagctttttcagatactttccggcatggagaatgcattgagaccagagaagaaggcagagtgggagatggtttatcaggaaagactcatcagtttgtttgagaatccatatctgtcacagcttcaggggaagacgatggatggttatgtagcttatgcaattgagaagatgggagataagcagcagaagttagagcagcttcgccgcatcacagaaggtattgcagagaataatgagcagaagatccgaatgggacttcgagaatactatctttcttatgctgatgcttttgtagaaagatgggagaagaaggcagaagaaacagaaaaaacagaaaaataggttgaattgttataggggtgattacatacatatgtaggttgtaatcgcccctttttctataaacaaagttttatctagatttgttagtgagcgattgctatggtagcaaaggcacctcatgttcgtcatttcgtacaagatgtgttaaaaaaacactggattatatcgcaaatatgatgataaaatataaatcagatgatgggttagaaaattggaaagggaggacgatggaaaaagcacgacaagtaaaaagagtcctgctgcaggcaattaagatcgcggtgggcagcagtgtagcaatttatctagcgcatatactgggattggagtatgaggcatctgccggaagtatcacactgcttacgttggtaacaacaaaatgggagacggtgaaattatctttttatcgtatggcgacatttgttttggcggtagttctggcggcgttgacatttggacatatgacgagttcctggcttgcgtatggaatctatgtatttctgatcgttgcggtcagtcatagtcttggatggtcggcaacaatttcggtaaatgccgttatcggcacacattttcttatgacaagagattttagtccggagtttattcgcaatgagctgtttttagtaatgattggaatcacaatcgcgattgtactgaatttgttctatgattatgaaggacagagacaggatctgattcgttatatgagggagacagagaatcagctacagattcttttgtgtgaacttgcagcgtatcttcataataaagatatggagattaatgtctgggatcagatcatcgcctttgaggggagaatgcatgaatttatcaaggcagcgtatgattaccaggataatacatttcattcgcatccgggatactatatagattactttgaaatgcgtctggcgcagctgcaggtacttcataacctgcattatgagatcaagaagatccgtaagatgccgaaacaggcacttgtgatcgcagattatatcatgtatatggcagattatgttgttgagatgaatattccagatcagcagatcgagaagttggaagagatttcggagcaaatgaagcaagaagaacttccaaagacgcgcgaagagttcgaaggacgagcacttctgtatcatattttgatggatctggaggaatttcttgtatataagaagcgatttgtgaatggattggatgagaagaagcttcgtatctactggaaacaggagatggagcaaaaagatagtgcaaacgagttgcagaaatgatgaaaagaaacggattaaagtcagaagaaacaaaaacaaagcattttctgattttaatccgtttttattaattataatatgttactgaaagaatcagatttttcccgggaataatgtgccggctcttccgccttttacaatatcataaagaacttccggacgctttccgtttgtaacaattgtgtttgttccctgggaagtggcaagggatgcggcctgaagttttgtacgcattccgcctgttccacgtcgggaacctgcgccgccggctaaagcatagacgctgtcatcaattgtatcaatctggtcgattagctgtgcatttggatacaatcttggatcgtggtcataaaatccatcaatgtcggagaaaatgaccagatgctttgcgcgacagagtactgcaacgacagctgagagcatgtcgttatcaccgaagagacgatcctcggattcgatttctttatagcttacggagtcattttcgtttacaatcgggattacacccatctcgagaagcgcattgaatgtattgatcagattttcctttttttcttcttcttcaatatcatctgcattgagcaggatctgggcaactgtcttgtcatagtcaccgaagaacttgtcatacagatacatcagactacactgtccaactgcagcagcagcctgtttcatacgcatactgtctggtttagcagtcatgttcagtttatttcttccgactgcgatcgctccggaggaaacgagtacaacttcatatcccatgttctggatatcagaaagtacacaggcaagacggtctgttgtacgaagatcgctctttccggcgtcattggtaagtgtagatgttccaacttttactacgattcgattattataaagtcccataatacataactccttgctgaatatcttttaaaataatttccggatgtcagttaacaaccagccttgtctcctcgactgttttatagtatcatacagttatcaattacaaaagcgaatgtttctcatggattacatgacaaaattaaatataaagtaagtgaagagatttttcgtagcgaaaacagatgggaaaatgtaaagcgaaaggagtgttaaattcatggatggaagtattcagaaatacatggcatttgttaagacagtagagtgtggaagttttacaaaggcagcggaacagttgagttattcccagtccgggatcagccgaatgatcaatgatctggaaaaggaatggaaggtagttctgcttgaacgaagcaagtcaggagtaaagcttacaagcagcgggatgaagttacttccttatgcggaacgggtctgcagagaatacgagaaacttcaattggaagttgatgagcttcaagggttaaagtcaggattgatccgtatcggtacattttccagcgtagcaacacattggctgccgaatattatcaaggaatttcagaaaaattatccaaacattgattacgagatgcttttgggtgattatacggatattgaagaatggatcatggaagggcgaattgactgtggattcacaagattgccggtaagggatgagatggatacaattttcctggagcaggacaggctgcttgtcgtgcttccggaaggacatccgctgacagaacttcagaagattccggtcagtgcgctttgtgaggaaccgtttatgctattggagaaaggtgctaaggcagaagtttctgagatctttgaaagaagtaatttaaagccgaaagtacatttcacaacatgggatgactacgcgatcatggcgatggttgagagtgggcttggaatcagtgttttgccggaactgatcttgaaacggattccgtatcgaattgttacacgagaactggaaatcccggcgtatcgtaatataggacttgccatgcgtaacagaaaaggtgcaactccggcggtgaagcggttcctagagtatctgcagtatagataataagaaatgtgaaacttttatgaagtggcatgttctgaatgataatttgcttgatagaaggaaatatatgagagtataatgttactattatgataaaaagggcttattctatgaccgacattataagagtcatcagcaatcagagaagagcacaaagattgaaagaaggagaaaaagatggcgattaaacatattttatttgacttagacggaacacttttaccgatggtacaggacgaatttgtccgtttttatatgccgcttcttgcaaaggcatatttgaagaaaggcgtggaaatggatccaaaaggattcattggtgcagtatggaaaggctatgaggcgatggtgaaaaatgatggttccaaaacaaaccgagaggcattctggagttatattgatgaattcctgccgctttctgtggaagaatcagaggcaatcgcagatgcattttatgaggatgaattcaatcaggccaagtgcacgacacagccgacaccactttcagatatggttataaaagaggcgaagaagaaaggcattgaagtttatcttgcaacgaacccgatctttccaagatgtgcaacaatgaatcgtatcgactgggcgggactggatccggaagattttaagattattacaacctatgaagatcatgtatattgtaagccaaatccggaatatttccgtcaaattctggaacagtttgagcttgatccgtcagagtgtctgatggttggaaatgacgtggaggaagatcttgcgatccgttcgcttggagttcctgtatttcttatcacagatacgatggagaataagaaaaaccttccgatcgactctgaatatcagggctcgatggaagagttactggaatttgtaaaagaattgccggaagtgtaagagtgcggtgagaatgtaaaataagaatgaaagataatcgtttaatattgcgaaacaccttgaggaggtattagtaaaaaatctcttcaaggtgttttgtgtttataggaagctgaaaacaagcgtaagaaaggcgcaatagagaaatttgttttacatagatttaacataaatcatatcagaatgtaaagcagcatttgtaaaatagaacagaaaaatggaaaagaatgttgtcagctttgtatttaagatgacaacaaagactcagagagggcattattatatgattaaaatttatgtgatggataccaatgttctgattcagtccccaaatgcgctttttagttttgaggataatctggtcgttctcccgatggttgtattggaagaacttgatcatttgaaaaaagcagatggcgagacaggagccaatgcaagaaaatgtatccgtctgcttgaagaactgcgtcagaaggggaatcttctggagggtgtatcccttgagaatggaggaatctgttgggttgaaaagaattttgtagatgttgaacttccggtagatttatctctggaggtcgcagataacagaatcttaaaggtttgccttggattaaagaaatcaagaaaagaacaggttgttcttgtgacgaaagatatcctgcttcgaattaaagcacaggtgttggatctgtgtgcagaagattttatttccgagcaggtgatagctcatgacagacagtataccggaagatgtgaagtttatgcaccggatgaattgtttaaggattttaagaaaaagggaataccggtggatgaagtttatcaattagatgagaatgagaaagcattttgtcctaatcttttggaaaatcagttcgtgatcattaaatcagatcaggcaagaaagaagacacatcttggaagagtggagcatggaatccttcggaaactggaatttaaaaagagttctccgtatggaatttctccaagaaatgcaggacagtatttcttacaggaagctttgatgcagccagcagagaaagcaccgcttgttattgtcaaaggaatggccggaacaagcaagacattttattctcttgcagtaggtctggaaaaattgatgaatcatccgacaggcgaatacagaaagattcttgtctgtagaccgaatgcgcagtttgacgaaggaatcggattccttccgggagatgaacaggaaaagatttctccgttgatgcgcccggtccttgataacctggagcagttgcttgattcgaatgaggacgagcgttataaagacgaagaggtattgcgggataaagtggaggaaatttattccagaggtttcattcaggcagaggcactaaattttatccgtggccggtcgatcgtcaagacgtatctgatcattgatgaagcgcagaatacaacgccggatcagatcaaaggcattatcacaagagcaggaaaggatacgaagatcattcttttaggagatccgaatcagatagaccgtccgttcctggatgagagaaccaatggtctgagttatgcggcagaacatatgaaaggaagtccattgtgctggcaattgacgatgacagcagaagaatgcgaacgttcagaacttgcaatggaggcagtaaaaagactttgaaaacaacatataaagagattcgggagatagaagaaataaatctgttgatcgaacagggaaatgctactttaaaagagcttggatatacagaacattccaaaaaacatgccgcaaaagtatcagatactgcaggcaagattctgacagagctcggatatggaaaacataagattgaacttgcaagaatcgcaggttatatgcatgacatcggaaatagtattaacaggcatgatcatgcacacagcggtgcactgctggcatatcagatattaaaggatacagagatgtcattgaaagatgttctggtaattatgacagcaatcggtcaccatgacgaggcaaccggagatgctgtggatccggtatcagctgcactgatactggcagataagacagatgtaagacgaaaccgtgtacagaatccggttccggcaacatttgacatacatgacagggtaaattatgcagccctgtcaacgaagttgacaattcaaaaagagaagaaagtaattcagatggaactggagctagatgatgaaatctgcaccgttatggattattttgaaatctttctggagcgtatgatcatgtgcagaagagcggcagaacgccttgactgtaaatttaagctaattgcaaatggcaacaaaatgtgttaaaggatggagaaaattaaaatgagtaatgtatacatgaaccgtgaattatcctggttgaagttcaatgaaagagtattggaggaagcagaaaacccggaagtaccgctgtgcgagcgtatgacatttgtgtcaatctatcagagtaatctggatgaattcttccgtgtgcgtgtcggatcacttcaggatcagatgctgatcagtacagagatcagagagaataagacaaagatgacttcagcagaacagatccgtgcaatcattaaagaagttaagaagctgaatcagagaaaagataaggcttatgagaagctgatgaagaagattgaagagtacggaattacattgattaatcatgcttctgcaaaatcagaggagaaaaaatttcttgagaagtattttatgaaggagatcatgcctttaagttcaccgacaatcgtcggcaagagacaaccatttcctttcttaaaaaatggagaaatttacgcagtcgttgttcttgagacgagaaataagaaggaaagaatcggaatcattccatgctccaacaatatgctgacaagaatggttgaacttcccggtggaaaaggaagatatatgctcattgaagatctgattcttcattatattggcaaagtctttaagggatacaaggtaaaggggaaatctttattgaaggtcgtaagaaatgcggatatcgatgccgatgcggcttatgatgaggatcttgattatcgtgagtttatggaagatctgatgaagcagagaaagaaactctctccggtgcgtattgatctttccagagagatggatgaaactgttgtagacgcattgtgcagatacctggatgtaactccggatagagtattccgtagtgaagcaccactggatgtttctttcgtgttccagcttcaggatcttctgcgcagaaatacagagctcttctatgaaaagcgcgtgccgcagaagagtccggaattcaaggatggacagagcattttacagcagatcacacaggaagacaagctgttatcctatccttatgattctatcagacctttcctgaaaatgctgacagaagcagcagaggatgacagtgtcatttccattaagatgacattgtaccgactggcaaaacagagtaaggtcatcgaggcactttgcgaggcggcagagaatggaaaagaagtagttgttctcgtagagcttcgtgcacgttttgatgaggagaataatatccgctggtccagaatgctcgaagaggccggatgccagatcatctacggactggagcattataaagtacactccaagctgtgcctgatcacacgcagaggggaaaatggaatccagtacatcacacagatcggaacaggaaactacaacgagaagaccgcaagactttatacagacctctctcttatgacagcgaatgagcagattggaatggatgccgcaagagttttccaggcactggctaaaggtgaagtagttgaagatatggaacatttactcgttgcaccaaaatgccttcagtctaaagtgatcgagaaaatcgaggaacagatccagaaacagaaaaatggagagactgcatacatcggcctgaaaatgaattctctgacagataagcgtatcattgataaattaatcgatgcgtctaaggctggtgtgaagattgacatgatcgtcagaggtatctgctgtctgatcccaggtgtggaaggtgagacagagaatattcatgtgatcagtgttgtcggaagattcctggaacattccagaatctatatcttcggaaatggagaagaggcacagtattatatcggatctgctgatttcatgacacgaaatacagtgaagcgtgtagaggttgcagcgccagtttattctgaacgattaaagaaacgtctgcaggatctttttgatctgatgttaagtgataacaaaaaagcgcgaaaggaggatgcaaaaggaacctattctgtggtagaatgtaagagacagccaattaactcacaggaacttctctatcaggaagcctatgcgaaagcagcagtgaacagtagtaatcagttggaggcggctgtacaacagacagaaaataaggtgatagaatgatctataaattcggggaacgtctgacagagatcagtcaggaagaatgggagaaagaaaagtgtcctgctgtgttcctcacagattccaatcatgcggaggagacattggcaacagcagggatcatatatgaaagtgaaatccagattgcgaagatcggattctgtaagattgagaatcagcaggaatgtatggtaggaactttctgcattccaaagcttcttgatgtattaggaagcagataccgaatgtacatgtttgtaaatgaaaataatgttgttatcgtagatgacgagacattttcagagcgacttattagtaggatcaagaggaaacgaatgcatcaaggtgagacgaaagagagattcctctataattacattgcagaatttatgagccgtgatctggagatccttgtggcttatgagcgtagacttcttcgtatggaagaggatgtgtcccaggatcatacagatacgatccagaaccgactgatgccaatccgaagggaacttctgaatctgagaagctattatgatgagatgatggacttgacaaaagagcttgaagagaacgagaatggattgtttttgaatgatcaattgaaatacttcggaacacttactgaccgtgcagaccgtctgatgagccgtacttctcatctgttggaatatgcccgtcaggtaaaagaggcttaccagtctcagattgataatagacagaataacaacatgcagtttttaacagtgatttctacgattttcttcccactgacattgatcacgggatggtttggaatgaactttaaagatatgcctggacttgaaaatggatatccggcggtaatggcacttagtattgtcattatcgtgatctgtattttgatcttcaagaaaaagaagatcatctaaaaaactgaaaaaactgtaaaaatagcgttgacaatcctcgattgaatgctataatgatggtcagaagaagttaaggattataaagcaacatagttcttagccgataacacgatgacgagacgagtaggatgtggaatgttacagagagagatacatttgctggaagtatcttagcaggaatcatttgaagactacctctgagtgaccccaatccggtccggtgattccgttataatcatgaatgaagtggttttaaagcagtacatttgctgtgatcttgaaaacaaaaagggtggaaccgcggatagtaaagtaattgataatcagactttatccgtcccttgcatgtgagtgcaggggatagatagagtcttttctttttccatagaatccccgaatgaaagcatgcatagttacttgaagaaaataggaggaagcgaaaatgattattacattaaaagatggatcaaaaaaagaatattcagaagcaaagtcagtaatcgacgttgcatttgacatcagtgaaggacttgcacgcgcagcctgtgcaggagaagtagatggagaggttgtagaccttcgtacagttcttgataaagactgtgaactgaacatccttacagcaagagatgagaaaggattggcagtacttcgtcacacagcatctcatgtaatggcagaagctgttcagacacttttcccagaggcaaaggttgcaatcggaccttctattgatacaggattttactatgatttcgaatgtcagtcattttcaagagatgaccttgacgctatcgagaaagagatgaagaagatcatcaagaagggggcaaagatcgaaagatttacaaaatcaagagaggatgcgatcgcatttttcaaagagaaaaatgagccatacaaggttgaactgattgaggatcttccggaaggagaagagatttccttctattctcagggagactgggttgacttatgtgcaggcccgcacctgatgagcacaaagggaatcaaagcattcaagctgttatcatcttcaggagcttactggagaggtgatgagaacaagcatatgctgacacgtatttacggtacagcttatgcaacaaaggatgagctgaaagagcatctgacacagttagaggaagcaaagaaacgtgatcataacaaacttggccgtgagatgaagcttttcacaactgtagatgtaatcggacagggacttccgctgatcatgccaaacggtgttattatcatgcaggaactgcagcgttggattgaagatgaagaggcaaaacgtggatatatccgtacaaagacaccacttatggcaaagagcgatctttataagatttccggacactgggatcactataaagaaggaatgttcgttttaggagatgaggagaaagataaagaagtatttgctcttcgtccgatgacatgtccattccagtattatgtatacaaagcagagcagcacagctaccgtgatctgccacttcgctacggcgagacatctacactgttccgtaacgaggattctggagagatgcatggtctgacacgtgttcgtcagttcacgatctctgagggacatttagtagtaagaccagatcagatggtaaaagagttcaaagattgtatcgcacttgcacagtactgtctgcaggttctcggagtagaagaggatgtaacatatcacctttctaaatgggatccaacagatactaagaaatatattggagcaccggaggtatgggaagagacagaaggtcatatccgtacaatgcttcaggaactcaacattccattcgtagaggatgtcggagaagcagcattctacggaccgaaggttgatatcaatgcgaagaacgtatatggtaaggaagacacaatgatcacaatccagtgggatgcgcttcttgctgagcagtttgatatgtactatatcgatgagaatggtgacaaacagcgtccgtacatcatccaccgtacatctgtgggatgctacgagagaacactggcatggctgatcgagaaatatgcaggaatgttcccaacatggctgtgtccggagcaggttcgtgtgattccgatttctgataaatacaatgattatgcagcgaaagtggaagcacagcttaaagaagctaatatccgctgctcagtagatggacgttccgagaagatgggatacaagatccgtgaggctcgtctgaacagagttccatatctcttaattgttggagcgaaggaagaggaagagcagaaagtatctgtaagaagcagatatcttggagatgaaggttctaaggatcttggagaattcatcgaagcaatcaaggatgagattgcaaagaaaacaatccgtaagattgaagtagaagagtaagaatagttacccgaaacaacaaaaataagaatctcccgaagaagttcaagtatgaaaatactgatttctacgggagattcttattttatgctatattgtaactgttcagagccaacctccaaaatgctacgcatttcgtcggtgtggcgtatccgccaaataaaatttcaaaaacaatcttaaaaatgcaagcattttacacctgttttatgaaattttgcttggctctgaacagttatgtcatattataatatccggcataaataccatttttctcaagcagagtttcatgtgttccgcgctctgcgataccattttctgtaataacaataatctcgtctgcatttttgatcgtggacaggcgatgtgcaatcgtgatagtcgttctgttcttggatagttcttccagactgtgctggatccagcgttcactctcgttatcaagagcactggttgcttcatcaaggatcaggatcggtggattctttaagaagacacgggcaatcgagatacgctgtttctgaccaccggaaagtcttgcgccgcgctcgccgacgaatgtatcgtactgatcaggcagttccatgataaagtcatggatgtttgcacattttgctgcttcgatgatttcttcttctgtcgcatccggcttgccataggcaatgttgtcgcggatggaaccggagaagaggtagacatcctgctgaacgacaccgatctggcttctaagactcttcaatgtaagagagcggatatcctgtccgtctactgtgacgcgtccgccagttacgtcgtagaagcgaggcaacagggaacagattgttgtctttccaccgccggatggaccgaccaatgcaactgacttcccagcaggaatctcgatcgatacgtgagagagaacagtcgtttcatcgtcgctgtaatggaaggagacatcttcgtagcagacacggcctttcacatctttgagttctactgcatccggtgcatcctgaatctcaggttctgtctccataacatcaaggaaacggcggaaaccggaaagtcctttctgcatcatttccatcagctctacgagaatctggatcgggctgataaagattccgatataaagagcatacatcgcaagatcagcagctgacatttcattgttggcaatcagatagccgccgtatacaagtgtgaccagatacatcattccctggaaaaagagattggagctcatgaattcgcccatgcatctgtaattgtctttcttggagacaaggaaggcgtgattgctcttctggaatttttccttttcgatctcttcatttgtaaaagactggacaacgcggatcccggataaagtatcttgaaggctcgcattgacatcaccgatcttttttctgttttccataaaggtgcgctgcatcttctgattctgtcggaaagagaagaggaacatcaagatcacaagtacgatcagcggaagagccagcttcttattaattaagaaaaggaaaataaaggatccgacgatcttaactaatgagataaataagttctccgggccatggtgtgcaaactcggaaatgtcgaacaggtcactgaccagcttactcatcatctgaccggagttgttctgactgtaataggaaaaggacagctcttcatagtgttcgaagagttcctgacgcatatcccgctccatcttagcgcccatgatatgtccctgacagctgacataatatttgcagaagctttggatgacatacatcataaagagtccgatcgcgatccacggaagcgcctgcaggataattgctttatcctgagtaaaaagtgtcttggtcgcacttcgtagaatctgcggataagcaagatccacaagactgataatggctgcacagagaaggtcaataaaaaagaccgttttgtacgggccatagtagtggatgaatttttttagtgtattcataaacaaataaatcctccttcgtattttttcttatatacattagtttagcataagtaaatattcttgacaagaaagtcggggtatgataaaaatgttattactgttaaaaacaatgcaaagaagtggaaaaagtcaggagaacgatcaatgaatttatatcttgccccattggaggggatcacaggacatatttatagaaatgcattacatcagtgctttgacggattcgataagtattttattccgtttatcagtccgaatcagaaaggacatttcagcacaagagagaagaaggatgtgatgccggagcataatcagggaatgtatgcagtgccgcagattcttacgaataacgtggaagatttcttgtgcacagctcagaaacttggagattatggatataaggaagtgaatctgaatcttggatgtccgtctagaactgttgtgacgaagggaagaggagcgggatttttggatgagccacagaagctggatcgatttctggatgcggtttttgagaaatgtaatctggaaatctcaatcaaaacaagaatcggaatggaagatccggaggagtttgagacaatccttcctatctataataaatatccgctgaaggagctgatcattcatccgcgtgtgcagaaggagttctataagaacacaccaaagcttgatacatatgcctgggcagtggaacatagcgaacatccgctttgctataatggggatatttgttctgtggaggacatggaacagttaaaaataagatttccacagacagatactgtgatgatggggcgcggcgtgctggccgatccggcacttggaagaaagctaaaaggcggaagtgccgcaacgatagaagagctaaagaaattccatgatgttctctatgcggcatattgtgaagaaatgtcaggagacaggacaattctctataagatgaaagaaatgtggttctatcttcatcccatctttacagatggaaggaagtatttcaagaagattaagaaatgtgagaaatgtgtagtatatgaatctgtagtgaaggaattgtttttgaaagaaaccgttctgggaaaatgatttgaaagaggtgacaaaaagaaatggacgctattttacaattagatcagaacattctgctttttattcaggaatatatccgtcatgactggatggactggttctggaaaggaatcacacatcttggagactttggaattttttggattcttcttacaatcgttctgctgattcctaagaagacgaggaaggcagggcttgcatcagcgcttgcacttattataggaacactgatcacaaatgtggcgataaagaatgtggttgccagaataagaccgtatgaagtgatacaggaattagatcttatgattgagaaacagaaggatttttccttcccttccggtcatacatgtgcatcctttgcatcagcatttgcaatttgtaggtgtaaggaagtgtttccaaagaagtggagaatcgcagcaatggttctggctactttgatcgcattatcgagattatatgtaggggtacattatccgaccgacgttctcggcggattgattgtcggactattctcgggctgggcaggatggaagattgaagagctgatcatgaaaaagagagcagagaaaaagaaatctgctgataataagtgaaggacaggaatttaagaacctgtcgtcagatagaaaaaggatttgattcatctggggtttgccagatacgatcaaatccttttttgagtccactttagagtgtgacttttaaaattttgctatttatttttctctttctgattctccagtgcagcttcaacgaatcccttgaacagtggatgcggtctgtttggtctggatttcagctccggatgcgcctgagttgcgataaaccatggatgagaaggaatctcaaccatctctacaatacggctgtccggtgaaagtccgcaaagggacattccgttttcttcaagaacttcacggtagtcattgtttacttcataacgatgacgatgacgctcttcaatctctttctttccatacagtttataagcaagagagttgtctttgagtacacatggataagaaccaagtcttaaagtaccgccaatatcttcaataccaatctgatcggacatgatgtggatgaccggatgagttgtatctggattgagttccatgctgtgtgcgtctttgtaaccgatgacatttcttgcaaattcaacgatagacagctgcataccaaggcagagaccaaggaacggaacgttgtgtgtacgagcgtatttgatcgctgtgatcttaccttctacaccacgatggccaaatccaccaggaacaagaataccgcttacgtcagagaagagttcttcagcattttcttctgttacagtttcggaatcgatccatttgatatttactgttgtgtgtgtgtaaattccgccgtgctttaacgcttctacaacactgatgtatgcgtcatgaagctggatatattttccaaccagtgctacagtcacttcctgtgttggatgacgaaggttttcaaccatctcagtccagtctgtaagatccggttccgggcagtcaagatgcagagactcgcatacaacctgtgccagatgttctttctccatggcaagtggtgcctcgtagagatattctacgtccaggttctgaagtacatggtcagccgggagattacagaacagagaaatcttgtttctcattgcatcatccagtggatattcggaacggcagacaatgatatccggctggattcccattccctgaagttcttttacacttgcctgtgtcggttttgtcttcatttcctgagatgctcttaaataaggaatcagcgtaacatggatcaggataacattttctgctccgcgttcatgctgaaactgacggatggattcaaggaaaggctggctttcaatatcaccaacagttccaccgacctcaatgatagcaatctcagtatctgttgcagccggattacggtagaaacggctcttgatctcatttgtaatatgagggattacctgaacagttcctccgccgaaatctccgcggcgttctttctgaagaacggaccaatagatctttcctgttgtaacattggaattttttgtcaggctttcatcgataaatctttcgtaatgaccaaggtcaaggtcagtttctgcaccgtcatctgtaacgaaaacctctccgtgctgtaccgggttcatcgtacctgggtcaatattgatgtaaggatcgaatttctgcatagttacagtgtaaccacgcgctttcaaaagtcgtcccaaagatgcagctgtaattccttttccaagaccggatacaactccgcctgtaacaaatacatattttactgccatagtgtctttcctcctccgtgaatagttgttatcaaaaaaaatactttccaagtatacacctattcagaaaaaaattacaatacttttttgataaaaacatagaaaaaagatgggatgaagtgattttaacgaagcaatgtaaagaaggaaggcgaaaaagctttgtaaaatgggagaaatgcagaaaaaaacctctcagacagcaggttgttatacctgaaactgcagagaggtttttgcgatatctttctttctgtattggtaaggatttgtctttagcttaaaatctgacgttcgttcacagcttcacttgtgagctgtacaccaagttttttaaatgtcttgatatcaacacttgaaagcattacggaagtatgagcctggcatcctttcagttttggaagctgggagagtgcaagctcagcgatcggattgacagcagcacttgcggaaagtgcaatcaggatctcgtctgtgtgaagacgaggattcttgctgttcaggtaatccactttcaatttctgaatcggttcaattgcttccggagagatgatatggacattgtgatcgatgccggcaagttccttcagtacgtttacaagaagggcagcgctcgcaccgagcaggttggaagtttttccggtgatgatgcgtccatcttcaagctccagtgcggcagcaggtccacctgtctgctgagcacgctccagtgctttgacagcaacttttcggtcagaaacagtgattccttccatattcataagaagttcgatcttctcagcttctttctcagaagcatcacctttcagaagcgcattgagtgctgcatagtagcgtcggatgatctcctggcgggaagcttcacggcaggcttcatcatcacagatacaatttccggccatatttacccccatgtctgtaggtgatttgtatgggctggaaccgtagatcttctcgaagattgtatttaaaacagggaagatctctacgtcacggttgtagtttacagttgttacaccataagcttcaagatgatatgggtcgatcatatttacatcgttaaggtcagctgtagcagcctcataagcgaggtttaccgggtgcttcagcggcagattccagatagggaatgtctcgaacttcgcatatccggcttcgattccgcgctggtgctcctgatataactgagacaggcagacagccatctttccacttccaggtcccggagctgttacaataacaagcggatgtgaagtctcgatataatcgttctttccgtaaccattctcactgacgatcagtggaatgttggacggatatcccggaatgttgtaatgaatgtatacagagattccaaggttctcaagacggttcttgaacagaagtgcactttcctgtccggagaactgtgtgattactacacttccaacgaaaagtccctgctcacggtaagtaccaatcaggcggattacgtctgaatcataagtgataccaagatccccacgaatcttattcttttcaatgtcttttgcactgattgcaaagacgatctcagcctggtcgctgagctcctttaagagacgcagcttgctgtcaggttcaaatcccggaagtacacgggaagcatgatagtcatcaaaaagctttccaccgaattcaagatagagtttgccaccgaattttccgatacgctcgcggatatgttcggactgcattttcagatatttgtcattatcaaatccaattttcatcgttttatcttccttactataaattttgccgaactgttattactattattaacagataaatctgttataaacaggcattacttttctagtatactatgaaacggcacgtttttacaatattttcataatctttttattgatttatggaaaaccactatttataatggtaggaagtagttgtttttttacaaataaggtaaaagatttgctggaaaataaccactatttaagttttggaggcaaaaaatggagaataacaataaaaacaaaggtccgaacaagaaccgacaggggtggggaattattttgttcactaccttgttggttacttttgttgttatgggcctatattctatgatgcagggcggaagcgcttctgagatcagctatgataaatttctgaaattagttgataatggaaaagtagagtctgtcacatttaccaattcaaggatcaatatcgttttgacagatgacgccagaaaggaaaaggcagagggaaaacttacagaagtaaaggataatgagaaagtttctgcagaccagagtgatagttcagattctaaggaaagcgaagatcaggaaaatgctatggacagtctgcttggccagatcagtcagatgcagggtagctccaagagcaaggaaccggattattacacaggaaatgtatcagatgacacacttgtaaagcgtttagataaggcaggggtagagtttaaatcccagattccggatacggcaagttcactgatcatggatatcttcatcacagtgatccttccgatcgtacttcttgtattcatgtttaatttccttatgaagaagatgtctaagggcggcggcatgatgggaatcggcaagagcaatgccaagatgtatatggagaagcagacaggtgtgacattcttagatgttgcaggtgaagatgaagcgaaggagtccttacaggaagttgttgatttcctgcacaatcctggaaaatatacaggtatcggagcgaagcttccgaagggagcacttcttgtaggacctccgggaacaggtaagacacttcttgcgaaagcagttgcaggagaggcgaaggttccgttcttctccttgtcaggatctgcattcgtagagatgtatgtcggtgtaggtgcttcccgtgtgcgtgacctgttcaaacaggcacagcagatggctccatgtatcgtttttatcgatgagatcgatgcaatcggtaagagccgtgacagcgcacttggcggtggcggtaatgacgagcgtgagcagacattaaaccagcttcttgcagagatggatggattcgatacgaataagggactacttgttcttgcagcaacaaaccgtccggaggtacttgatccggcgctgttaagaccgggacgtttcgatcgccgtatcatagtagataagccggatctgaaaggtcgtgtcgagattcttaaggttcatgcgaaggatgttaagatggatgagacagtcaatctggaagagatcgcgcttgcaacttcaggagcagttggatcagatcttgccaatatgatcaatgaggctgcaatcactgcagttaagcatggcagacaggttgtcagccagaaagacctctttgaggcagtggaagttgtacttgtaggtaaagagaagaaagaccgtatcatgagtgcagaagagcgaagaatcgtatcttatcatgaggttggacatgcgcttgtcacagcacttcagaagaatacagaaccggtacagaagatcacaatcgttcctagaacaatgggagcactcggttatgtaatgcagacaccggaggaagagaagtttttaaatacgaagaaagaacttgaagcaatgatcgttgttgcactcggtggacgtgcagcagaagagattgtatttgacactgttacgacaggtgcatcgaatgatatcgagcaggcaacgaagatcgccagagcaatgatcacacagtatggtatgtcagagcgctttggtctgatgggacttgaatctgttcagagccggtacttagacggtcgtgcagttcgtaactgtggagaagcgacagcagcggagatcgatgaagagatcatgaagatgctcaaagcttcctatgaagaagcaaaacgcctcttgagtgcgaacagagatgctcttgataagattgcagccttcctgatcgagaaagagacgatcacaggtaaggaattcatgaagatcttccgtgaagtgaagggaatccctgaaccggaagaagcagatggagaaaagaaagaagagcaggagtccggaagaatcctgatgaagccgacagagacacaagcagcagagccagaaacagtgaaagaaccggaaacagaaaaagagccggaaacacaggcaacagaaataaagtcacaagaaacggtggaagaagaaaagtcagagtaagagctgattatcagtattaagagtttcgcagatgaataggaaaagtcatttgcgaaactctttttctttgatgaaaacatgttataatgaaatgaggcaaaatgtgtcagggtatatcagatgtgagatgactcccatctgatatagcctccggcaggattgcagagatgcgcagaagaagtatgtcatgcattgcatgacgcgcatctcgcagcaagaatgcagaggcattcttgaatgcaaggcacagaagatgtaaaacatcaatcaagacagtagcaaaaaaacaggagacattgggatgacaaaagcagtattttttgatatagatgacaccatttatgattacattggagcgcataataatacgatgccggtgatgaaagaatgggcatatgagaatttaggcatagcaaaagaagacttggagaaatatgttgccgaggcaagagtgaaggcagatgacagagccggaagagattatgcggtgaaccataatcgcctggtgagatttcagtgtatgctggagacacttggaaagccagttttcccatatgcgtatgagatgtataatctgtactgggatacattgattgatcagattattccatctcctggaattgaagagttgatgaaagaattgaaacagcgaggcatttatatcggtataggatccaatatgacttcagacgtccagtatcggaagatattaaagcttggattaggtaagtatattgatggaattgtgacaagtgaagaggctggcgaggaaaaaccgcatcgaaaactttttgatctctgtgttgaaaaagcaggagtgatggtggaagaaagtatctttatcggagacagcatcgcacatgatgtgacaggagcacagaatataggaatgccggtgatcttgtatcggtcgaaggaagatgtgaatgagatcgagtggcttcagacagagaagggaaaatgtccggtcattgcacatttttctcagttttttgaagcagagaagatgttataagaaatgaaaaagatgtaaaagaaacattaataggaataaaaaggagacataagaaaaaacatgaaactggtcgaaaaagttccaaaggatctatataaaatatttggaagtaaatatatggaattctatatgcagtttctggtagcgctttatgaggagagcagtcagtctttttctcttcttgggcttacggaacgagagtgtcagatgatcatgaatgaacgactggcgaagatggcactggactggagtgaggcaagagtcgatgaagaaggagaactgatcaccagagccaacatggcatcagtcagtctgaagcattttgaagactggggatggcttagaagggattatgatgaaacgctgaacagttatgtcgtttcatttccggaatacagtcagctgtttgtagaattatttcagaaattatacagtgaaaatgacggtaaggaacgagagagtgtgcttacggtatacagtcatctctatacctacagtttagacaaagagaagaataatgagattttaaaaagtgcgcttcatacatcaagagcacttctgcagatgctcgcgaacatgcaggagggaatgcgaggttatttcgatgaactgtcaaagcagagaagtttccgaggaatccaggaagtacttgtgaaagagatcaataacagtgacagtaaaaaatacgcgatattgactacaacagacagcttttatcgatacaaagaagctgtaaaagagttgatcgaagaaaatctggaaaagacagaagcaagaaaatactcatttgaaacagaactcttaagcgaagaggaaaatacgagaaaatcttaccgtctgcgaagaatgatcgagatctgtgaagaggcgacagatatgctctacaagatttcgcgagagtttgatgcgattgagcgaagatataataagctgattgaacaaaagacagtatttgcaagccgtgccgcagcaagaatccggtacattatgatggaaggtgtaatggaagaagatcagacagtcgcactgattaatctgatcaatgaaagtggcaagtcggaagaaatcctggataagctgtcttcaaaacttaggttttcggagccatataagattatgacagagaagagtctgtatcaaagacgtgaaaatcagaaggaaaagttcactccacaggcggtaacacctgagaaatcacaggaagagaatatgacagaatttgtcctggaaccactgtatacgcagaaagagatcagagatttccgaaagaaaaatgaacagaatggaaaattcacagtgacaaaagatactgtaaaatcaatagaagatttggagaagttatttatggtatggcagcatgcaacagaatctgcggacagtaaggcacagattgaagtggcgcaggagatggagaatgaggctggtttccgattttcaaaacttacgatagagggagtagaatcagatggttaattatatggaagaattgtcagtgacagaagctgataacctgaagaaaacaattgctgcattattcagacagacatgtattttacagatgaaatatgatcctgtaacacttgtcccaagagacaatctgcattatgagatctgtacaagacacagaaagtttattgaagactatctgtctgttttaagctgtgaattagtgcatgacccacaggaacacatttaccgtttacatggagatggaattgcgatagaaaagataaatgccaccgttacaaaagtaatcttactggttaaattaatttacagagataagattttaggagaaggcttgaaagctacagtgacgaatctggcggagattcgtgaatatggaaagaatacgaatctgattaattataagcttacgatgggtgagtggaaagaaactttatatgtgatgagtaagcatcagatcattgaagtgccgggagcaatccagaatgttgaggatgagactccgatttatatctacagcacgatcaatctatattgtggaagtatggatattactgcgttgatcaaagaatatcaggaagatcagtacgcagaggaagagattacagaagaagtttctgaacaggaaatccaggaagaagcagagggaggtgtggaagatgaaagagaaacagtcgaagaaaatatttactagaatgttaatgaataactggggcggtatcagtcacaaagtgatggagttccatgagtatgtgaatcttttcagtgggaaaagtggatctggtaagtctactgttatggatgcaatccaggttgttttatatggaagtatatcttccacattcttgaataaagcggcagatgacgcgaagaacaggcgtagtgttctaagttatcttagaggagcgcagaaagatggttcctttaaccgagaagaccaggacttctgttctcagatcgtcttggagattaaggatacaggaaagaatacacatacttgtattggtgtttcatttgaggttggaaaggcagatacagacatcaggaaatattgtttcttcagtcattccggaaagattccggaggatgaatatttgacagaagaaggtgttccgtatacaatcgcgaaacttaaaaaattggtagaagcaaggatagaatcggctgacaacagaggtcgcggagatgtgaaccgtgtatatccatcgaaagaagcgtatttaaaaacggtttatgatgcaatctttggttatgtagagccgggccgtatgatgacaatggagaaaagcgcgattgcacttcgtatgacgaacggaacgggacagtttatcaaagattatatgttcccaaagagcaaggaagacacagttgcaacaatcagtgatcagcttggcgcttaccgtgagatcaaggaacgcgtagaagatctggagcagagaattaaaatgcttgacgagatcagtcagcataatctagccttgcagaaagcaagagctgataagatctatgtggaacagatcttaaaatatattgaaatagaaaattgtaaggcacatttgcaatcgaaagaggatgatctgcaggatattctcaagaagatcgaggaaaaagacgaaaagagaaaatcttatttggcagagaaagacgcttatacaaaagagcaggtagaagtcgaggcagaactcaaagccagcgattatggacagaaagagaaggagctaaaggagattgaaaatacgatccagctcctggcaacgaattcagaacaatggagggatattgtaaaaggtctttcagcctgggaggaagatgatgaagtcagtgcttatgtgagcaatcaggcgctgcatagaattgatgatatccgagatggtgttgtgagtgaagattcgattgaaaagctaaagcaatatttaagtgatgcactcgataacatcaatacagaattaggcgatgttcgcgaaagaattcgtgagaatcagaaagaacttcaagagaagcgggagatggtagaagacctcaaaaatgacagaaaaccatatcgtgcggaattgaagcgtgcaagacaggaattgcagaatatacttagtactcagtatggaagaacaatccatgtaaatatctttgcggacttgtttgatattacggatgaagagtggaaaaatgcaatcgaaggacgtatgggacgtgtgaaacacagtctggtgacagcacctgaatatacgttagatgctgcgaaagcatttcgcaaaatgaagcagatgaagggaatcgaggatgtcgaactcatggatactgcggcaatcgtgagagacaagccgaaggcagatgagaacacactgtatgagtgtgtgcgcgcagaggaatcttatgtagatacttgtctgaagcgatacttaggccgcattaagaaatgtgagacagtagaagaacttcatgagacgagagatggtgtcacaaaggactgttattcctacagcaattatattttcagacatttaagaaagaatgattatgagaaatatgcctgcatcggaacgaaagtctcaaaggcgaaacttcttgagttggaagaagaagcagcgaagctgaaacaggaagtggaagaggactgccgtgttgagatggcactgcgtgcagcacagaaattcgagtgtctaaaccagagcacagaacagatcttacatctttcaaaagcagcggaacagcttcaggattattacgagaaacaggaaaaattacgtctggaagtagaagaattgaaacgaggcgaccggacagtcgaactgaagaagaaaaagcaggaattactggagttgcttaagaaaaatgcagagattcttgatagcattcaaagtgaagtagtacagtatgcgaagacacagggacaaatcgagagtaatatcaaatcattttcagaaaagataaacttcctgacagagggatttgttgttaacgaacagcttcagaatgaagtaacagatgcgttaaaagtacagagcgaagcagcttataagagagacaagacaaaagaaaaggatgctttggaaatgttggaagagacggagaaagaagaactgcaaagaagtagaaataagttcaataatgcttatccggcctatggttttacaggaatagaacatgaaaatgatgtgtatgacaaagtgctgaatcagtgtaggaaagattttgaaccgaagtacaaggaagaatttgataagcagtataatctggtttactatacattgcgtgaaaatgtgattgcttccattcatggtgaaatcaaggcagcttacagacataaaaaagagatcaaccgtctgcttgcgaagatcaagttctcagatagtatctaccagattgatatcataccggctcagaatgaaaatggacagttctatgagatgcttacagcacctgaactagacagtaaagtgttcgatgactacggatttgaaggtcagttaagtcttggtgaggatgagttctatcagaagtatgaagaagatatcaagcgtctgactgagaagttcatgcctcctaaggaggaagatgcaagatccttaagccagtatcgtcagcagatggagcagtatgtggattaccgtaattatctgactttcagtatgtatgaaaaggtggaagatgagaatggaaatatccgcaaaaatgcagtcgatgatatggcaggccgtgactccggaggagagggacagaacccgaaatatgtcgcactgcttgcaggatttgcgatgctctatatgcagcagacaaaccgtgattctaagatccgtctggtgcttcttgatgaagcattttccaagatggataaggagcgaagcgaagtgtgccttcattatgcgagagagctggagcttcagctgatcgtatgtgtgccggatgaacgtctacagtcgctgatacgaaatgtagattgtgtctatggattccgaagacatcagaatcaggtatccatgatgcatattgataaaggcgattacctggatatggttgagggaaatgaataaggaaacggttatcgtaccgtatgatacagagaaagcagcaggatcaatcattctgctgctttctgtattctgacggtgttatcccaaattgttttttgaatgcagtatgaaaatgactctggctggaaaagcacagaaattcgctgatcgtactgatagatttatctgtatactgcagtaattctctaccttcttccagtttgcaacgtaggataaatgcactgacagagaatccaagtgtttttttaaaataggcagagaagtaggatttgctgaatccgacgtaatcagcaacatctccaacggtgaggtgctgattcacgttctgctgaatataacgaattgctttctgcatgcgctcgtctgttgagatgggcgtttttgattgtgccaccttttctgcaaaagtataactgacttttccgagaagatcagttaaccggtccgcacttgtcagtcgttcagaagattggatgaaataatcagagagctgatatgcagtgtcataatccagtcctccttcaattgcagcacgggtacataaggtcgttgtgatgataatattattttttaactgacgtagagcagtagagcctgtgacaccgatatgaaagttactttcgctatacataaattccttaaatccttcgcagttacctgtgcggacaagtttcaaaagctgttcttcaagaatatatgtctggttgtgttgctcattttcctttttatgataagtttcttccaaaagaagagaggcatcggtcgtaacatcattttcagaaaatgtctgcccaacagaagtaagctggtcgagtgaaatggtttcttcgtgcagacaataatttaaaaagatacattttttcaacagagaaggcaaggatagacatggaatctgacgaagaaaggaattgaaatcaaggcggctgtcgtttgataccatgtagtctttgtataaatgttgcaagtcggaatcagaataaggtacagttgtgatcggaccaaaaacaatgtaactgtttttccagtgatttaatctaagagagcaaaacatgattccatattcagtcgtacagtaagtgatacggtcagaaccggaaaaaagttcccgaagatattggaatggaggatgagtcagttcgttttgctccggcatgcagaaaatacatttttcatccgaaaaaagatacatggggatattcgagtctgggtaataagcttttatgaaattaatcagggaatatattttttccataagtttctgcctctgttctatgtgtgaaaatgctatgtacgttacattctatcagcgtaatcgaaaatattttccaagtcaatagaaaaatagataataaaagtgtaaatatataaataaaagtttaaaaatgaaataaatacgaccgttttccagttattataaagccatgatgaaaaaccgatagaacaagcaagaagtaagaaatcataaaaaatggaggtaatagcatggagaaagagaagattcagagtctgatttcacagatgacactggaagaaaaagccggaatgtgttccggagcagacttctggcatctgaaaggagtggaacgtcttggaattccatccgttatggtaacagacggaccgcatggactgagaaagcaggcacagggagctgaccatcttggaatcaacgagagtgagaaggcaatctgcttcccggcaggatgtgcgacagcatccagttttgaccgtgagctgattcgcaaacagggagaactgctcggtcaggaatgtcaggcaatggatgtcagtacaatcctcggacctgcaatgaacatcaaacgttctccactttgtggaagaaactttgaatattattcagaggatccactcgtatctacagagatggcagcagcactgatcaaaggagtccagagcaagaatgttggaacaagtgcaaagcatttcgttgcaaacaatcaggaaaaacgccgtatgacaaactcatctgatatggatgaaagaaccctgagagaaatctatcttgcatctttcgagggtgcaattaagaaagaaaaaccatggacggttatgagttcctacaaccgtattaatggtgaatttgtaggagacaaaaaagagtatctgacagagatcttaagagaagaatggggatttgacggatatgttgtttcagactggggtgcagtaaatgacagagtatcttcacttgcagcagggcttgaccttgagatgccacctggagattatgaggatgaccgactgatcgtgaagaaagttcaggaaggaaaacttgatgagagcgtagtcgatcaggcttgtgaaagaattcttaacattattttccgttacacagagaatcgtgatgagaaagctgtattcgattatgaaaaagatcataaagcagcggctgaaatcgaagcggagtgcatggtattattaaagaatgaaaatgaaattcttccactgacttctgataagaaaattgcatttatcggaaaatatgcaaagacacctagatatcagggcggcggaagctctcacatcaacagctggaaagtagagtcagcactggaagcggcaaaggagattccggagcttgcaaatgtgacttttgcagaaggatatcaggatgagaaagatgaagttatcgaagagctccagatgaaagctgtaaaggcagcggcagaagctgatgtggcagttctttttctcggacttcctgataactttgaatccgaaggatatgacagaaagcatatgaatcttccggattgtcagaatgagcttgtagaaaaagtgcttgaagtacagaaacacgtagtggttgttcttcacaatggttccgcagtcattatgccgtggaaagatcaggtggaaggtatcttagaagcttatcttggaggagaagcagtcggaaaggctgttgcagaagtgcttgcaggaagaaaaaatccttgcggacgactggcagaaacatttccacttcgtctggaagatacaccttgctatctgacttatggaaagggatatgataattctgattacagagaaggcgtgtttgtaggatatcgttattacacatccagaaaaatggaaacagcgttcccattcggatatggtttgtcttatacgacatttgagtacagtgatcttcaggttgacaagaaagaaatgtctgacaacacttacttctacagtatctttatccttcttttgaagaatgaccttgagaagagatatcctgaaatcgtagctgaactgcagaagagaaaagaagcaaaatagataataaatagcagatagtagtatgaggggacggagctgacaccaagtttctgtccctttttggctaaaggactttttgaggatataaagatggaggaattatagatgaaattatatgatcttagaacagaatacagagaaaatccaatcggactgacagacaaggcaccaagattttcatggaaaatagagtccgaagagcagaatacaatccagacagtatatgaaattaatgtaacagatgagaagggtaacgttgtctggaacagtggaaaaaaagcatcagatcagtccgttttgatttcttatgaaggagaaaaactggcagatgaaatgctttataaagtagaggtatctgtggcagataaccatggaaatgtagaagcaattgaaggaacatttgagacaggaatttttaacaatacagagtttatcgcaaagatgatcacaagtgatttccctgaagaagagacagcatgcccggtatttggaaaaacatttgcaattgataaaaaggtaaagaaagcccgtctgtatgcaactgcacatggtgtatatgaagtgacactgaatggacagacagtcggtgattaccgtatggcaccgggatggacaagctatcacaacagactgcagtatcagatttatgatgtgacagagcagcttacagcagaaaatgaaattgcgattacagttggaaacggctggtataaggggatcctaggattcacctgtgaaccaaatcgttatggcacacaggcaggagtatttgcagagcttcatgttgaatatgaagatggaaacaaagatgtaatcgctaccgatgaaacatggtctgtaaaaacaggagagatccgttacagtgaaatttacatgggtgagacaatcgacacagatgcaccgaaaatcatagaaggaaatgttgttgttaaagattttgacaaaggagtattaacagcacaggagaatgaacctgttcgtatcacagagaaaattgtgggtaaagagttgattgtgacaccaaaaggtgaaaaactcgttgattttggacagattgtcacaggtgttgttgaggttcatgtgaaaggtgaaaagggccagaagattgtactccgtcatgcagaggtactggacaaagatggaaacttctatccggagacacttcgtcaggcaaaatcaattgatacatttatctgcaacggagaagagcagattttccgtccgcatttcacattccacggattccgttatatctgtgtggaaggaatggaagaatttacagcagatcagtttattgcctgtgtgacacattctgatatggaaaagacaggtgatttccattgttctaacaaaaaagtaaatcagctgcaaagtaatattatatggagccagagagataatttccttgatatcccgacagattgtccgcagagagacgagcgtcttggatggaccggagatgcgcaggtattctcctggacagcggcatttaacagaaatacagcattattttacaaaaaatggatgcgtgatgtggcagcagaatcttctcttgaaaagggtgttccgcatgtagtgccggatattttggattcctacagttcttctgcatggagtgatgtagcagttatcgttccgtgggtggtttatcagatttatggcgataaaggtattctggaagaaaactggaaatgtatgcatgagtgggtagattacatcaagaacaactgtgaagagaatggtctctggcagagcggattccagtacggagactggcttgcactggacaaagaagagagcgcagacagaaccggagcaacggataaatatatgatcgcaaatgcgtactatctgtatgtgacagagcttgtaaagaaaacagcagaggtgctgggaaaagacgaagaagcgaaaaagtatgcggatctttatgaaacaactttggatgcattccagagagaatactacacagagacaggacgtatcgtaagcgagacacagacaggtgcaattatttccctgtattttaatcttgcaagagaaaaagacagaaaacgcattttaaatacattgcttagcaatattgcaaatcacaaaaatcatttagctacaggattcgttggaacaccatatatctgccatacactttctgaaaatggagctcatgaaatggctgcaactctcttcatgaaagaagattatccgtcatggctctatgcagtaaacatgggagcaacaacaatctgggagcgttggaattcaatcaaaccagacggaacatttgatgaatcaggaatgaattctctgaaccattatgcgtatggttctgtaggagactggatgtatcgtaaagttgccggattatctcagttagagccgggatataagaaattccaggtaaaaccaatgtttgtaaaaggcattgaagagtggggcacagagtttgattctgtttacggaaagattgtggcaaacacatcctgcaagaatggaaaaattcatgtccatgtagaagttccggccaatacaacagctgtgattgttcttccggaaaaagaggaagtacacgaagttggttccggtgtatatgattacgaatataatacagagacaagtcttgttgtagagcgatttagtatggacagcacacttggcgaaatcgttgcagaaccgcttgcagttgagatgttcaaccagatggcaccgggaatgctggaaggtccaatgatccagttcgcttatggaatgacactcgcagaactgctgggagctgcgccacaggcaaaaccgatgtatgaggcagtagtgaatgcactgaatcagaatacaattatgtagcagcatgcggttttgtcccaaacatgaaactttattttcatgaagttgaaaaagcacgaccatgtatcctgatcgtaccgggtggtggatatgcagtagtttctccatctgaaggtgagatcgtagcaaagaagttttatgagatgggatatcagactgcatctgcaaaaccaaatgcagtcattctttcctatccggtgatcacatcaggtgactgtgcacatagaggttcctttacagcacttttgggagccgatgcttctgaggaagaactggaatatatatctctggaaaaacaagtgacagaagatatgccgccatgtttcttgtggcagacggcgacagatgaactggttccggttcagaattccttcttatttgcacaggcgctacaggaaaagaagattccttatgcattccatgtattttcaaaagggaagcatggattgtcacttgctgatgaagcatgggcaaatgaagagtttggagaaccatatacattggaacagacttttgcactggggcaggcagtgaacgatggaacatttcctgtatcggaagaagcgaaacaggctttgaatgagatggtgaaaatgttcaccggacagacagaacgtaagaaagaacaggaaaatgaagaagtaaaacagtggccggagctggcggatgagtggataaggatgacactttaaatagcacaatgcgttagtatccttacttggcagaaaacaggattcatgctatcattaaaaacaacgatagcatgggttctgttttacgtgagaaactcacaaaccgtgtttttcatggtttaaattaaaaggagatgcaaatgacagaattaagaaagcttccaatcggaattgaagatttttattatgtagatttgcaaaagaaggagcacagttttttatagttacccattcgcctattctattaggtataccagatgcagacatctattgttttgacaatgggcgaattcatttatgtgaatatgaagaaacagagagttatcaaataacggaaatgttcataaataataggcagatgttgcttgatagactgctcacagattagtgctgatgaaaatcgaaggataaaatatggaattgaacgaaaagaatctgccattggcaaaatggctgatcgataagacgaatacaaaggactatcgtataggaaatctctcaggaatgaaacatccaaaggtggatgggaatcttttgaaaacagtaggtggcagagatgaactggtcagacaggcaaaagttttggaaagaattccagcattaggcggagaagaatatctgcattttgactggagagaaatgaatacagatattacgaggattgattatagggtagaagtggttccaagattatgtgagctgatcggaatcatggatccaagagaacgccagttacaggcaatttcaagaatatgtaaactgcaggtggatgtatccgaaagctgtctaagcgcttattgtgatcatgtgttagaacagctgaataaaggaaatacgaaagagttatccaaagcggaggatgaagaatttcttaaatgcctgaaagctttagctgatctgaaagaaccggaatggaagcgtgtgttcagctctaaagtatttgaaaagaaaaatgatatcacaccatctaaagttttcgaacgcatttatcaaggtgcagttattgaagctttgaaatactctccgcaatatgacgagggaatgtcagatgatgagatactggcagcacatggaatattaagttattctcagacattagaatggaaaggtgccgtggagtattgtctgacagatcgcagtggcatagcgagcgaggagaaaattgacacttcttcgaattattatggaacagtacttaatgcacagacattagagcatgccgttccaactttacgaaatgatgttgaaaaaattattgtaattgagaataaagcgaattacgaaagcatggaatatgatccaaaagttttatatatcttttgtcatggctacttttcgccaaaagaagttcgctttttgcaaatgttaatgaagacagcaccggaagaaatccagtgttatcactggggagatatggattacggtggaatacagatctttttatacaatgagaaaaatattttcccaaatctgactccatggaagatggatgttctttcttatgaggatgctttgaaaaatggaaaaggcattaaactaaacagtgagaagaagaaaaaattagaggcattaaatgctggacaattggaagcgttgaagcaatgtatcctggaaagtgaaatggaaattgaacaggagatgttaataggataacttgagaaactcgcagagcgtgtttctcatagttctattttattttcagttctccaatttcttggtgacatcccatagacatttttgaatgcacgtgaaaaatgcaactgattcggataccctacggcattcccaatatctgcaattgacagtgaagtgatcttcaaaagctctgcagccttagtcatacgataactgatcaggaattcctgtggagaacgtccaatcgtatcgtgaaaaatttttccgaaataacttcgattcaatccgcagaatgcggaaatatcttctacagaaatatcattctgaaaattctgttcaatgtacgaaagagcttctttaatataaaaatcccggatacttccgttttgcttcacatgaactgtcgcagcagaacgcatgaaataatctaaaaataaatagagatgtccaattagatgaaacggagattcttcgggatgacggctcagataaagcatttcttccatcatctggttgcgaagttcctttgaacttgcatgataaacggggtgattcaggctcagacctgcggttgtgacaatctcgcgggcccgaagaccgtcgaattctacccacgtatattcccacggaagcttagaatcagcaatataagtattgacctgtcccggaaaaagcatgaagccttgtccactttttacctgccaagtgatggtgtttccgttttcatcatctgcaagtaatgttcctgttccggaaatcacataatggaaaatgtaatgatttcttgctgcaggaccgaacgagtgagccggtgcacattgttcccatccatattgatataatcccagatcaacaaaattttcatttggaaatacagaaaaaagtaagtcgctcatataaatcacctctgatagcattatatatcaaaatgctagatgacttcaatatatgaatgaaaaaattgtattttgctataaaactaaaaaaactctgatatttatagtggcataaagatatgttagaatatgattatcaaatagatgacctaagtgaaatgacaaaaatattccggaatgtgtcaaaatgaaaggtgtatggtagaaggaaggagtaaggaaatgtataagaagagcaatcgaatcatttgcatgggattgatgctttgtatgacttcggcaatggtactcggaggttgcggacagaagagtgaaaatagtggaaagatagaaatcgagcttgtacagtataaacctgaggcagtgaaaacatttgaaaagattgaagaagaattcaatgcaactcatgatgatattcatttgacgatcgaatctccaaatgatgcaatgacagtacttaaaacacgttttatcagagaagacgctccagatattatcggaatcggtggagatgtcaatttctctaactttatagattctgatatgcttatggatatttcagattatgaaggtctggattctataaaacaggcttatctggatatagataaagcgttggaatttgtacctgaggacggtgtgtatgccgttccatatgtggcaaatgcagcaggagttctgtacaacagagcaatgtttgaggaatatggctgggaaattccggaaacctgggatgaatttatagccctctgtgaacagatccagagtgaaggaatccagccattgtattttggatttaaagatacatggacttgtcttgcaccgtggaatgcgatcgccgttgatcttgcaccggcagatgtctgcagccaggtgaacaaaggagagacaacattttcaaatgaatatagagaagtagcagaaaagacaaaggcactgcttgcatatggaccgaaagatcctttcgcttatgattacaatggagcttgtacagcatttgcaaacggagaatctgcaatgtacacgatcggaagttatgcaatcccacagattcagacagtaaatccagatatggatatcgattcctttgtaatgccggctaataatgatgcatcagagaacaagctgaactctggtgtggatcttcagttcagtgttatgaaagattgcgagaacaaagaggcagcgtatgaagtgcttaatttccttttgaaagatgaaaatgtacagagttatctggatgaacagaaagcggttccttgtaaggaaggagattttgaacttgctccaacacttgatggagtgaaatctttcatagaagaaggaagaatggcagattaccaggatcattactatccttcagagatgtcagtagatgcacagatccagacatttcttatgaaaggggatgtggatgcattcttaacaaagtttgatacagactggaagagatataaccgtgatatcatccgcaaagtggaagattacgagaaagagcatgcggacgaagattaaggaaggggaattcaagcatgggaaagaaatcaatgagtggaagaaaaatgacctttcttctgataacaattccgatcgtggcactgtttttctgttttaatacattgccactgatcaaaggtgtgatttacagttttacgaatttcaaaggttatggaagctttgactgggtaggacttagaaattatcaggatctttttacagacagcagagtcggaggttcttatctgtttacatttaaacttgcaattgtagctacgattgtgacaaatgtaatcagtttgatccttgcactcggactgaatagtaagattaaattcaagagtgcgtttcgtggtgcctactttattccaaatgttctcggagcgttggttgtaggatacattttcaattacttttttacatacattcttccggctttcggagaaatgcttggaagcaagaccctttcttccagtatgctgtctagtacaaaactggcatggatcgcagttgtaatcgtgtgtgcatggcagtcgattgcgatgaatacaattatttatatttcaggactgcagacagttccggaggatgtttacgaagcaggagcgattgacggtgcaacaggatggaataagttcagacatctgacattccctctcattattccattctttagcatcaatatggtactctgtgtgaaaaacttcctgatggtatttgatcagatcatggcgttgaccaaaggaggtccggcacagagtacagaatccatttcttatctgatttataacaatggtatgagtggcggtcagtttggattccagagtgcaaacgcagtgatattctttatcgttattgttgtaatttctgtattacagatgacaatcacagggaaaaaggaggaacagctgtaatggaaaaaatgaaaataaaagaacgagtaaactggcctgtaacgattttacttttacttggtctgattacggttgcttttccactgtatatgacaatcgtaattgcactgaagaagccttctgagatgacgaatagtatcagcggaatcctttccttgccaagtcatttgagccttgataattttgctgaggcaatgagagtgacagatttctggcattctctcggaaacagtgtatttattacacttgtaacagttgtcctttcaattctgattcattcactgttggggtatgcaatcggaagaaataagaagagtaaattttacaaattcatttatttctatgttgtcagcggaatgtttgtgccatttgcaattctgatgatgcctgttgtaaaacagacggcgcagatgggactggcaaacagagcaggagttattattctgtacgttgtattttatatgccgatgaatgtactgctttattcaggatatttgacaaatatcccgttggcattggaagaagcagcctgcgtggatggtgcgagcacatggaaaacgtattggaagattgttttcccaatcatgaaaccaatgcatgcgacagttgcagttttgacagcacttggtacatggaacgatgttatgacaccacttgtgatcatgtccggttcaggaagcggaaatacacttccgttggcacagctgaacttccagacacagtttggaacaaattataatctggcatttgcctcctatctgttggcactgcttccgattctgatcttctatctgatctgtcagaagcatatcctcaacggagttgttaatggagcagtgaaataataaaaagtaaaagatagcgaagcgagaacagacagtaatgcagatcttgcttcgctaaaatggaaaacaggagtatttagatatgggaattatatattgcgagaaagacagaacatttactttacagacaaaaaatacaacatatcagatgcaggtggatcgctatggatttttgttacatctatattacgggaagaaaaccgatggatgtatggactatcttctgacatattatgacagggggttttcgggaaatccatatgatgcaggagaagatcgtacgtattcaatggatacacttccacaggaatttccttgttacgggaacggggatttcagaagtacagcatttgcagtagaaaatgcagatggaagtatgagttgcgaccttcgttacaagagtcataaaatctttgatggaaaatataatctgcaaggacttccggcagtttatgcaagtgataaggaagcacagacactggaaatcttaatggaagatccggtaacgggagttaaggtggtgcttctttatggagtgcttcccgcacaggatgttattacaagaagtgtgtgtgtgaaaaatgaaaacagtggcaaaatctatttaaacaaaattgagtcagcaagtcttgatttcctttatggagattatgaacttctaacattttatggtagacatgcgatggagcgaaatgttcagagagttccggttgtgcatggaacacagaaaatcggaagtgtcagaggaacctccagtcatcagtacaatccgatgatgatccttgcagaaaaagaaacgacagaagaaaaaggaaattgttatgcaatgtcctttgtatacagtggatgtttccagggagaagtgttgaaagatcagttaaaccagacaagaatgatgctaggacttcaggaagaagcttttcgctatccgttggaaacaggagaaatgttccaggctccggaagtgattttatcctattcctcagaaggaatgaatcgcttgtctcagaatctgcatcattgtatcagacaacatatctgcagaggcaaatataaagaagaaattcgtccaatcttgatcaatagctgggaagcagcttatttcgattttaccggagatacaatctatgagcttgccaaagcggcgaaggaagtcaatattgacatgcttgttatggatgacggctggtttggaaaacgtgatgatgataatagcggactgggtgactggtttgtgaatgagaagaaacttggtggcacacttggaaatctgatcaagaaaattaatgatctgggtgtgaagtttggtatctggatcgagccggaaatggtttcagaagacagtgatctttatcggaaacacccggactgggcattggcggttccgggtagaaatccggtcagaagcagaaaccagcttgtattggatttttcaagaaaagaagttgtagatgaaatttatgatcagatttgcaaagtgttggatcagggaaatatcgaatatgtaaaatgggacatgaatcgaagcttgatggatgtttattcttctgtaacaagagatcagggaagagtgttacatgattatgtattgggactatatgattttctggaacgtcttgtgcagagatatccgaatctgctgattgaaggctgcagcggtggaggtggaagatttgatgccggtatgatgtattacactccgcagatctggtgtagtgataatacggatgcaattgacagattacggatccagtatggaacatcctttggttatccggtatcggtagtaggttctcacgtgtcagcagtgccgaatcatcagacgggaagaaagaccccacttcatacaagaggtgttgttgcaatgtccggaacttttggatacgagctgaatcttatgaaactttctgaagaagaaaagcaggagatcagagagcaaatcgcagaatataagagctatgcgtcgattattcagaacggattgtactatcgtctctcaaatccgacaacagaagaaatctgcgcatgggagtttgtgcatacagatgagaaagaacaaagtaaagttcttttaaatatagttatgcaggtgattcatggaaatatgacagtaaattatgtaaaacttcaagggcttgaagaaacagctgtatatcgagaagaaaagagtggaaaaagatacaccggagctgcacttatgtatggcggcatgccgcttccgatagagccgggcgaatatcaggcatatcagtattgttttgtgaaagagtaaaataaattggttgacgatggaacagaaaatggtgaagaatgtgaataatacagaaaaaatctttgcacagcgtatggaaaaacatcaggatgaattacgctggctttacatggagttgtatggaaatgatgcaatgtatgcagaactttgtgagcagatgcatgattactacttgaagcgtagcacagagttgaaaaaaagagatattaagaaagaaaagaattctgactggtttaaggaaaaagaaatgcttggcatgatgttgtacattgacaactttgccggtaatctgaaaggtgtagaaaaaaagttagcttatctgaaagagtgtaatgtaaattgtcttcatcttatgccttttctggatactccgaaaggaaaatcagacggtggatatgcagtggcagattttcggaaagtaaggccggatctcggtacaatgaaagatcttgccagattgacagaaaaatgtcatgaaaatggtatgaatgtatgcatggatttcgtgatgaatcatacttctgaggaacatgagtgggcaaaacgtgcacgagcaggcgaaggagaatacatgagccgttatttcttctatgataacggtgatattccggcgagatacgaagaaactgttccacaggtatttcctacaactgcaccgggaaatttcacatggcttccggaaatcgggcattatgtgcttacgacgttttatccatatcagtgggatttaaattaccgtaatccaagagtatttaatgaaatgatgtataactttctttttcttgcgaatcagggaatggatattatccgtatcgatgcagttccttacatctggaaagagttaggaacaagctgcaggaatctgaaagaagtacatacgattgtcagaatgatgcgtatgattgcagaaattgtctgtccgagcgtgatacttcttggcgaagtggttatggagccggaaaaggtggtgccgtactttggtacagttgaaaaatcggaatgtcatatgctctataatgtgacaacaatggcgacgacctggaatagtattgcgacaagagacatccggcttttgaagaaacagatggatatagttagccgtttgccaaagcaatatacatttttgaattaccttcgttgtcacgatgatatcgggtgggggcttgattttgatacaatgaaacaatggggaatggaagagccttctcataagcgttatctgaatgattattttaccggaaagatagcagacagcatcagccgtggagagttatataacgatgatcctgtaactcaagatgcacgattttgtggaacaacagcatccatgtgcggaattgaagcagcgggatttgaaggaaatgcagaaaaaatgcaggtggcaattcaagaagatctcatgctccacgcttacatgttgacacagtcgggaattccgatgctttacagtggtgatgagttaggacaggtaaatgattatagttataaagatgatgctgaaaaagcatctgattcacgttatctccacagaggagcattcctgtgggaactcgcggataagagaaaagatctttctactgtacagggacaattgttccagatgttgaaccgattggaacagatccgaagacaggaaaatgtcttttcccaggaagcagaagtatatacttatgatgttcacaatgacagtattttaggaatcctcagagagtataagggagaacgatttattgcactgtttaatttcagcgaaaatgaacagactgcgtggatgcaggaagaaggcattttcagaaatctggtgaatggtgaaattgtagaagtgaaagatccagttttgaaaggctatgaatttgtttggatgaaatataaagcataaaacaaaatgtaaaatatagataaaaaggttgaaatactgaaagaagaattgtataatttcacctataacaacaaaggaggatctttgaaatggatcgtttgaaaggtaaagtagctattattacaggaggtaactcaggagttggagaagcaacagcaaagatgttcgccaaagagggcgcaactgttgttatcacagcgagaagagaggctgcactggagaaagtagcagaagagattaaggcagcaggaggagaagttttcgctgtttcaacagatatctcaaagaagggagatccggagcgactgatggatctcgtgatcgagaaatatggcaaggtagacattcttgtgaataatgcaggaattcttgaggaaggactgaaaccaatcgatcgattctcagacgaagatcttgatcgtatcgtagagacgaacgaaaaaggaactatgcgttgcatgcgtgctgcagcacagaagatgcaggcaggagcatctatcgtaaatgttgcttctatcgctggagtgaaaggatgtggcggagctgcttatgtagcatctaaagcagcaatcgtaggagtgacaaagcatacagcacttcgtttccaggcaacaggaatccgttgtaatgcaatctgcccgggaaatatcattacaccaatgacatcaggaacaaatccggcagcacttgacccggatatgatcggtgcaatgtcaacacacagtaatcttagaacaccatcttgtacagcagaagatgtagcaaatgtaatcctgttctttgcaagcgatgaatcaaaggcaattacaggacaggcaatcgtaacagatttcggagctatgctgtaaggaaaataagatagcaactatttaaaaaggacagaaaggttaacaaaacgaaacctttctgtccttctttgtatataaataaaaaagaatgttgcaaaatgaaacataaaagtgtatactaaaagaaaaaagcggtgattctatgaaaacaaaatttaacgagtatttgacaaaattacgtaaatcccgggtctacactcaggcgcagatggcagaaaaactggggatttccagatcgacttataccaattatgagaatggaaaccggacaccggactttgaagtgctggaacgaataagtgaggtgttagcctgttccttagatgaattatttggaagaaaaccaacttatgttgcaagttgtgacgtggtaaaggaagacagcattctgtacaatgtatctgggatacaagaggaaaaacctaaacttgcaataggagtacaggactttcgcgatttgcgtgaaaaacaagcctattatgtggacaaaacacagtttattgaacagtttttagaatcctggtatcagattacattaattacaagaccgagaaggttcggtaagacacttaatatgtcaatgttggcagaatttcttgactgcacaaaagattcctccgatttattttgtggaacaaagattacaaaatctgtccactacaaggagctcaatcgatatcctgttgtatttttgtctttccttaacgtgaaagcgggggatgcagaatctttgtgttatgcattgaaagatactgtacgtgcggagtatgagcgcttttatcagatggttaatgatggaagactgtcagaattccaggtgaaagaattcaatatgatttataatagtttatgtcaggaaagcatcggaaaagaaatagaaaatcatgtaattcgttcaattgctgttctttgtcaggcactgagtacgtattatggagaaaaagtatttttgctgttagatgaatatgatactccgtttatgtctgcaaattcagaaggatactatgatgaagtaagagccatgttgaatcgttttctggcaacgtccctgaaaggcaacgattatcttcaaaaggcaattctgacagggattcagagaattgcgaaggaaaatgtattttcgggtctcaataatttagttgtctgcacagtgcaggacgaagattatgatgactgttttggttttacagagcaagaagtaaaagagctgcttgcttattgtaaagcagaattttcagatgagctgaaaaagatgtacgatggatatcattttggcagtacagatgtatataatccatggtcaatatcgtgttatgcggcaagaagaaggatggattcttattgggttaatacaagcgaaaacagtattttacgtaatgcacttgaagtacagggaaggtcttttgagaaagaatatgagaccttggtcacagaaggtgaagtagaagtgacagtagatttttcaatggcttattatgaaaaaatggacgaagcaaatctatggggacttcttgtaaatgccggaattgtaacaattacaaaagaaatcgaagaggactattaccgacttcgggttcctaatctggaagtgtggaaagtgttcaaagaattaacagcatgtcatctgaaaatcgatgagagacatatggaaaagatgttaaatgctcttaaaagaaaggatatggaacgttttgcagaagagtatcagagagttcttttggaattgccatcttatcatgatctgaaagatgagaatagttaccatatgatgacgcttggaatgtgtgcattttttagaaaggattatgatatcaaaagcaatcgggaaaccggagaaggcagaagtgatatctgtctttatgcaaaacatgacagatatccaaatttaattttggaattcaagtataccaaagatgaaaaagacgatttagaaaagcttgcagaaaaggcactggaacagataaaggaaaaacaatatgacgcagagatgaccggagaagtgtgttatgttggactggcacattgtgggaaaagagttactgttcactcccgtgtcgatcactccgctgattgacacggaggatgcatgttttggcttgaatgcatctcgccccatcgccaaaggcgatttaaaatggcgagatgcgttgctggtcgcacattgtgtgaacagtaacggaaaagatcttgtatcagatggagagaaaacggttgacatctatcagataagcttttatactaatcatgtgaagaaaacacggggagcttgtgtaccaggctgagaggaagttgagaacttcgacccataacctgatttggataatgccaacgtaggaatgtataaagcagtactttagagagatacatttgttggtatctctctttttatatattaggaaagtgttttcctaatatataaaacgctccgctaaggatgcacactgcggcgtacaatgtagatgtcgcaagcgaccgccgcaggcgcaagaatgtgccaaggcacattctttgttactaatcaggaaaaattgaagattggaataagttgagattgagcgagagttcatgaaggggtgcaccaccacgggtacatttctttcatgaactcttttttcaattatccggaaaggagtagttatgattacagtaaatggaaagcagatccagctgacatctgaaatgagtgttgcggattatctggagcagaacaattaccagattaatagaatcgcagttgaaatgaatgaagaaattcttccgaaatacagctattcagagacaatgctcaaagacggtgaccgtctggaggttgtgacatttgtaggaggaggctgatatcagatggcatcagaaagaatattaagcaaagaggaaatcgaaacagcgctgaatgaacgccattcgccggaaaaacagaagcttttatcagccggtcaggtgacgattgccggacttggtggactaggttctaatgtagcgtattcacttgcacgaattggagtagggcatctgcatctgattgattttgatgtggtggatattaccaatttgaatcggcagcagtatttcatggagcatatcggaatatataagaccgatgcgctaaagtcactgcttttaaagatcaatccatatctggatattcgtacagattgtgtgaaggtgacagaagagaatttgaaagaactgtttgcggatgctcagattgtctgtgaagcatttgataatccggtagcaaaagcaatgctggtgaatggaattctggagcattttccggagaagaagcttgtgtctgcaacaggtatggcaggctatgaaagcagcaatataatcagtactaagagaatgatgaagaacttttatttatgtggagatcgtgtgacagagccgacttatgggaatggattaatggctccacgagttgcaatctgtgcagggcatgaagcaaatatgatcacgcgtttgcttcttggagaagaggatgtatagaaagacatctaaatgaataaaaaagaaagaaggatttaagttatgaatcagaaagatacatttacacttggaggaaaagaatttagttcacgttttattctgggatcaggaaaattttcgcttgatcttgtgaaagcatgtgtagaaaaagcaggagcgcagatcattacacttgcgcttcgtcgtgcaaatgaaggaggacttgcgaatattttggattatattccggaaaatgtaacacttcttccgaatacatcaggagcaagaaatgcagaggaagcagttcgtattgcaagactttccagagaagttggttgtggtaactttgtaaaaatcgaagttgtcagagattccaaatatcttctcccagacaactatgagacaatcaaggcaacagaaattcttgcaaaagagggctttgtagttatgccatatatgtatccggatctgaatgcggcaagagatctggtgaatgcaggggctgcctgtgtaatgccacttggggcaccgattggttctaataaaggactttgtacaaaagacttcatccagattttgattgatgagattgatctgccgattattgtagatgcaggaatcggacgtccatctcaggcatgcgaggcaatggaaatgggagcggcagctgttatggcgaatacagcaatcgcaacagcaggaaatgtcgaggagatggctgaggcattcaagaaagcaattgaagcaggaagaagtgcttatctttcaggtcttggaagaacaattgaacgaggtgcaagtgcatcttcaccattgacaggatttctggaagactaggaggcagttgagatgaatgatacacatgttaatgaaagtattttaagtgaagaaatactggaagatcagaagaaaaacagaatcgatcatatgacttatcttccgggaatggaggatatcggatcagaaatcatggatcaggtgatcgaggcaatggaagcctatgattatagtaaatatacggcagcagatgtgaaaaatgcacttgcacattcggaacgtactccggaggatttccgtgcgctgttatcaccggcagcccttccgtttttggaagaaatcgcccaggcagcccagacagagacaagaaaacattttggaaacagtgtttatatgttcacaccgatttatattgcaaactattgtgaaaactattgtatttattgtggatttaactgtcacaataagatcaaccgtgcgcaattgaatgcagaagagattgagaaagaaatggcagcaatcgcagagacaggattacaggaaatcctgatcctgacaggggaaagccgcaacaaatctacagtagagtatattggagaggcatgcaagattgcaagaaagtatttcaaagtgatcggtctggaaatctatccggtcaattcagatgagtatgcgtatctgcatgaatgtggagctgactatgtgacagtattccaggaaacatataattcagataagtacgagacgcttcatctggcaggacataaaagaatcttcccataccgtgtcaatgcacaggagagagcagtgaaaggtggtatgcgaggagtcggattcggtgcgcttttaggactggatgattttagaaaagatgcttttgcaacaggatatcacgcatatctgttacagagaaaatatccacatgcagaaatcgcattttcctgcccaagacttcgcccaatcatcaataatgacagaatcaatccgatggatgttcatgagccacagcttctgcaggttgtctgtgcatatcgtttgtttatgccatttgcaagcattacagtttcaacaagagagtgtgcacgtgtcagagataatcttgtaaatatcgcagcaactaagatttcagcaggggtaagtacaggaattggaagccatgtggatgatatcgaggataagggcgatgaccagtttgagatttcagatgaacgttcggtagatgaggtttatgatgcattattgaaaaataatctccagccggttatgagtgattatatttatgtgtaagatgaaatgcgatttatcgaagatggatttgaaaattatagctgtcagtaatagaaaactgtgcgaaagaccatttttggagcaaattgaacgggtttgtcagatgaaaccgcaggcaattattttgcgtgaaaaagatctgtcagaagaggaatatcggattctgtcagaagaagttctgtctgtttgcaagaagtatgagattccgtgtattttacataagttctggaaaacagcattggaattggaatgtacatctgtacatctgccattgccggaattaaggaaacttccggaaggtgtgaaagaacaatttcaaagaatcggtacttccgttcattcagtggaagatgcaaaggaagcagaaagacttggtgtgtcttacatgacagcaggacatatttatattacagattgcaagaaaggcctggcaccgagaggacttggattcttaaaagatgtctgcagtactgtgaatgttccggtatatgcgattggtggaatcaagtttgatgaaaaacagtgggaagaattgaaacaaaatggtgcttccggaggatgcattatgtccggaatgatggaactataaaccatgagatatcatgaaatagaattaatgaagcaatacaaattaacttgacctgaaccgggctttacatagtataataaatgcacttgattacgaggatttatgaaattgtaattaggtgcattttttgcatgaaaagaattacgattgatagaaaaaatcagaacagcaacaagacaggaggaaaaagatgcaggatgaattacataataaattagcacatttaaaagagtacataaaagaactggacagtgttgcgattgcattttccagtggagttgattctacatttttattaaaggtggcacatgagatattgggagataatgtgatggcgatcacagtacaatccggttcctttccaaagagagaactaaatgaggcaattgcattttgcaaaaaagaagatatccgtcataaggtctgtcaggtggatgaaatgaagattgaaggattttctcagaacccaccgaatagatgttatttatgcaagcatgcactgtttgaaaagattggagcaattgcagagaaaaatgaaattgcttatgttgcagaaggttctaatatggatgatcttggcgactacagaccggggcttcaggctgtggcggaattaggagtaaaaagtccactgcgcgaagcaggacttacaaaagcggagattcgtgaattgtcaaaagagatgggactttcaacctgggaaaagccatcttttgcctgtctggcttcaagatttgtatacggagaaacaatcagcaaagagaagttgatcatggtggaaaacgcagaacagttattgcttgaacatggcttccggcaatttcgtgtccgtatgcatggaaggatggcgaggatcgaagtactgccggaagagtttttgaagttgcttcaggaagaagtccgtgaggatattgtaaaacaatttaagcagttcggattcacttatgttacaatggatctaacagggtacagaatgggaagtatgaatgaaaccctggataagaagaattagaatgaggcgaaaaagatggaacaaaaggaaatgatagatcttttaagacaggtagcatccggaacaatggatgtagaacaggcagctttgaagttaaaagaagagccttttgaagatcttggttttgccaagattgaccatcacagagccatgcgccagggtgtggcagaagtgatttatggagaaggaaagacaccggaacagattttccggattgcagaagcaatgaaggaaaagggacagaaagcagtcctgatcacaagaatgaataaggagtcagcgatttacgtgggagaacacctggaacttcaatatgacgaagtcagccggattgggtttataggcgaagctccaataaaggatggagacgggaaaatagttgtggcaacaggcgggacaagcgatatccctgttgcagaagaggctgcaagaacagcagagacacttggaaatgaagtgatccgtttatatgatgtaggcgtcgcaggagtacatcgtctgcttggacatctcgacgaattaatggaagctcgtgtcattattgctgtagctggaatggaaggagcactcgccagtgtgattggaggactggtggattgcccggtgatcgcagttccgacaagtgttggatatggagcatctttcggtggcgtatcagcgcttctttctatgttgaattcttgtgcaagcggagtgagtgttgtaaatatcgataatggatttggcgcgggatttcttgcaagccggatcaatcacatagagaggagaacgaaggaatgaggatattatatttagactgtgggatgggagcagcaggggatatgctgacggcttcattattgcagttgttttcagaacctgtaaaacaggtgaaaaagttgaatgatctgaaaatcccgggggtaaaatatcagttggtggcgtgtacaagaggcggaatcagaggatatcaggtccgcgtgtttgtgaaaggacaggaagaagagaatcctcatatgcagacggaagagcagatcggacataaatcagaagaaccagagaagcatacacaagaacacggacatcactcaatgtctcagatcgttcgtctgatcaatcggttaaaaattgaagatcaggtaaaacaggacgcagttgcagtttataaattgattgcaaaggcggaaggaaaggcgcatggtcagcgcatggatgaaatccatttccatgaggttgggacgatggatgcagtggctgatgttgtggctgtctgctatttgctgaatgaacttcaggtggatcagattcttgcgtcaccggttcgtgtcggatatggtcatgtgaaatgtgcacatggaatccttccggtgccagcaccggcaacagcgtatctgatgaaagaaattccaatgtatgcaggagacctggagggagaattctgtacaccgacaggagccgcacttctgaagcattttgttaaaaagtatgaacagatgccggttctgcagatggaagaaatcggttatggttttggaaaaagagagtatgaaagactgaactgtgtgcgtgcgattcttggagaaacgcaagacaaggtagaagaagaaattttggaactgtgctgtaatctggatgatatgacttcggaggaaatcgggtatgcgacagagcttctgatcaaagaaggcgcattggatgtttacacatcctccattcagatgaagaaaaaccggccggggattctgcttacatgtatgtgccgggcagagcagaaagagtattttctacagctgatattcaaacacacttcaacacttggtgtcagagagtatttttgtggaagatatggacttaagcggaaaatagacgaagtgcagacagaatatggaaccgttcatgtgaagagagcatctggatatggagtggtgaaagaaaaactcgagtatgatgatgtttcccaaattgcagaagaacatagctggtctgtagcagaggcaagaaataggatctatggaaaattataattttaatatacaggaagaattgaaaaagcttccgggaaggccgggagtctatctgatgcatgatgagacggatcagattatctatgtcggaaaagcaatcagcctgaaaaaccgtgtgcggcagtattttcaaagcagcaggaataaaggggttaagatcgaacagatggtaacacatatccgccgctttgaatatattgtgacagattcggaactggaggcgcttgttctggaatgtaatctgatcaaggaacatcggcctaaatataatacgatgctgatggatgacaaagcctatccattcatcaaggtgacaacaggagaggaataccctcgtattatgctggcacgtcagatgaaaaaagataaggcacgttatttcggtccttatacaagctcacaggcggtgcgtgacacaattgatctgatccataagctgtatcatataagaagctgtaatcgttcacttccaaaagacattggaaaagagcgtccgtgtctgaattatcatatcaagcagtgtgaggcaccgtgccagggatacatttcccaggaagaataccggaaatccattgatgaggtgatccgttttctaaatggaaattttgatatgattttaaaagatctggaagataagatgatggccgcttcggaggcactggaatttgagaaagcaatcgaatatagagagttattaaatagtgtaaaaaaggtggctcagaaacagaagattacagattccagtggggaagacagagatgtcatggcagttgcatgccaggacgaagatgcagttgtacaggtcttttttatccgtggcggaagattgatcggaagagaccatttctatctgagaatcagcgaagaggataaaaaatctgaaattctgaacagttttatcaaacagtattatgcaggaaccccttttcttccgggtgaactgatgctgccggaagaaatcgaagagcaggaacttcttgaatcctggctgagcgcgaagaaggggcagaaagtaacaatccgtgtgccgaagaaaggtacaaaagaaaagctggtagaactggcggaagagaatgcgaggatggttctgtctaaagataaagagcggctaaagagggaagaaggacgcacgatcggtgcagcgaaggagatagcatctttattgggactggaacagatcgtccgtatggaagcatatgatatttctaatacaaatggtttcgaatcggtaggctctatggttgtctatgagaaaggaaaaccaaagcggaatgattacaggaagttcaaaatcaagagtgtgaaaggaccggatgattatgcgagcatgcgagaagttcttacgcgtcgttttacacatggattaaaagaacgtgaggagaatgcggaagctgggaaatttacaacatttccggatttaattctgatggatggaggccgtggacaggtaaatattgcattgcaggtgcttgatgagttgaagctgaatattccggtctgtggtatggtgaaagatgacaatcatagaacaagaggattatattataataatgtggaaatcccgattgaccgcaattcagaagcatttaaactgatcacaagaattcaggatgaagcccatcggtttgcaatcgagttccacaggcagctgcgtggcaaagggcaggtacattccgttttggatgatattgaaggaatcggtccggccagaagaaaggcattgatgcggcattatctgagcctggatgcaatccggagcgcaacagtagaagaactggcgcagcttccgtcaatgaatgagaaggcagcagaatcggtttatcaattctttcatgattaagggttttatcgaaaagaaaatcatgatatacttatgtacaggcgatgggacatgtagggaaatgttggatttatgcgagcagtaagtatcatatatctcttgagcttatcaaggcagcatgtctgaaacgaaaagagatacaggaaaaggagattacaagatgagtggtgtgaaattaaccgatatcgttgaaaagatgaatctgaaaaatctcactccggaagtagatatcacagaacgtgaagttcttgttccggatgtgaacagaccggcacttcagctggcaggatttttcgatcattttgatctgaatcgtgtacagattatagggaatgtagagtgtgcctatctggagactttggaagaagagaaaagagttgagatttatcagaaacttctggaacataaagtaccatgtattattttcagcaatgaacttcagccggatgaaagcttcattgagattgctcagaaaaatgatattccggtattcggtacatgtaagaagacatcctcctttatgggagaactgatccgttggctgaatgtaaaacttgctccgtgcatttccattcatggagtgcttgttgacgtatatggtgtcggagttttgatcatgggagaaagtggaatcggtaagagcgaagcagctcttgaactgatcaagcgtggacatcgtcttgtgacggatgatgtggttgagatccgcaaagtcagtgacgatacactggttggttctgcaccggatatcacaagacattttatcgagctgcgtggtatcggaatcgtggatgtaaagtctatgttcggtgtacagagcgtaagagaaacacagaatatcgatctggtcattactctggaagactggagcagagagaaagaatacgacagacttggtctggaggaggaatatacagaattccttggaaaccgagttgtctgccataatattccgatccgtccgggacgtaatctggcgatcatcgtagaatctgctgcagttaaccacagacagaagcagatgggatacaacgctgcacaggaattgtacaaacgtgtgcaggagaatctggcaaagagaagaaaataaaacaaaagagaaacagaggatgcggtacaaatgttacagagtaccgcattcttatgtgaaatataaaaagaaacggagatagatttatgaaatattgttttggtgttgatatcgggggaacaacggttaaacttggtctgttcagtgaggcaggtgctattgtagagaaatgggagatcgtgacaagaactgagaatgaaggtgcggcgattcttccggatgttgcagaagcaatcaatggtaagttagagcagcacggcattgagaaagaacaggttcttggaatcggtgtcggtgtgccggctcctgttactgtagatggaattgtcaacggttctgcgaatcttggctggaaatataagaatgcaaagaaagagctggaagaactgacaggattgacagcagagtttggaaatgatgcgaatgtcgcagcacttggcgagatgtggaaaggcggcggtgttggttaccgcaatatgatcatggtcacacttggaacaggtgttggaggtggcattatcatcaatggaaagatcctgacgggagagaacggagcaggtggagagattggtcatatgtgtgtgaatctggaagagacagatacttgcggatgtggcggacacggatgtctggagcagtatgcatcagcaacaggtatctctcgtcttgcaagaaagaagatggagcatgagacacgtgcaacaatcctgacaaaagaagatctttctgcaaaagctgttttcgatgcagtcaaagaaggagacgaagttgcgattgaagttgcgacagagatgggaaattacttaggacatgcaatggcagatatggcagcagtactggatccggctgtatttgtaattggtggcggagtgtccaaagcaggagaagttctgctttcatttatcgaaaaaccatttatggaaaaagcgttctttgcaaataagaatgtgaagttcaagcttgctactcttggaaatgatgcaggaatctgcggagcagctaagctggtacttgaggattgataaaagtataacaagtgcagaataaatagtagaaagaaaaaagaggagatttttacagaggttggatatctgtgaaaacccctctttttttggaaaatctattatgcaagcacttttttgaaactaactttaaagtatatggtttctgcaatcgctgtgagtccccaggagaagatgtacagcagatacagagatggaattgtatggaagtaagcaaataccgtatagatccatataatacgaaatacacaggatcccatgattacaataaatgtaggagcaatgctcttgccgattcctctggaagatgcaatcgcacagtccataaaggcgctgaatgcataggagaatcccataatcctaattctatgcataccagctgcgataacggctggttctgtggcaaacagagacaagaatgggcgcccaaagaagaagagtgctcctccgagaagcaggcctgcactgaaagaataagtaagtgttacgagatagcattttttcattctttctttattcccggctccccagttctggctcatgaaactggaacaggccacatagaaggcaaacataacattgtaaatcagattgtctgcattcgcagctgcagcatttccggaaaccatgatcgcatcaaaggagttgactccggattgaacaaaaaggtttgcaatcgcgaaaatcgcattctgaagaccggatggaacaccgagataaagaactccttttccataaatgttatgataacgcagattgcgcagacaaactttacattcatcatcgcgtcgcatcagatggatcaggatcaatcctcctgaaacgtactgtgcgattgcactggcagtagcaactccgacagcagccatatggaatacgataacaaagatcagattcaataggacattaagtattccggcaaatgcaaggtaatacatcggacgctttgtatccccacgggcgcttaagacaccgttgccgaaattataaactgccgtggcaggcatgccaagtgcaaaaactttcatgtagagaacagcctgatcgagcagttcgggctttgtattcatcatggaaagcattggtcctgcaaaaagcagacagatcagacagacaaaaatacctgccgctgcacagataatgagtgcagagtgaatggtttcttttgtagctttcttgtcaccggcaccgagtttattggcaacctggacgttgacaccacttccgagcccgatcagaagtcccgtgaacagtgtgacaagtgtagttgtcgagccgacagaaccaagtgctttgtaatctgcaaaatgtccgacaacagcgacatcacttaagttgaacatcacttccaaaatctgggaaaatataagaggaacactgaagaaaaacatgtttttccaaagagatccctgagtcatttcaattgttcgctttcgtcttttcgttatttcattattcattcccaaatacccctttaccagataaaataatgaaagaaaacagataaaattacaaaaaaaacatcacttccaaaagaaagcaatgaaaaataacgtattgtattgtgcattaataaaccttttggatgccccaaacatccgtatctgttgttactgttcacacgatgtgtgaccagcaacgcatctcgctattttaaatcgcctttggcgatggggcgagatgcattcaagccaaaacatgcatcctccgtgtcaatcagcgaagtgattgacacgggagtgaacagtaactatctgttttctggttaaaatccgatgattcttatatacagtgtagcatgaaaagtgcggggaaacaacaggaaaaacaataattttttttcaatgattcttttattttttcagatgaatttaagccttgaaaataaatttttacgacaaaaagattaaaataaatcaagaaaaagattaaaatagactcttgatttctgatttcagaggactataatgtcagagtaaacaaaatacagttcaccaaaattcgttgatgagaacaaaaccgtatccgtcattattttcagagagtctgtggctggtgtgaacagacaataaccgggtaaggatatcctctctaagaagcgggctgaaagcagatgaacatgttgcaagtaaacctcgccgggatccaccgttatatggatagcatatgttggtatgtgaagtgtcgcagaattaatttttgcggaattagggtggtaacgcggattatattcgtcccttttcagattgagttctggaaagggacttttttctttgaatatatctcaagaagaatacaaattttaggtgaacaagaatcctaaggaggtattgtaatgaaagcattacaaaaagtcagcaaatttttatcagattatacttcagtggttgttattgccattgcagtagtgacattctttgtcccgacaatgatgggatgggttaacaacgctttgtttgtcgatccggtatccaataaatttacctgtcagtctattattatcggagtgatcatgtttagtatgggtctgacattaacaacagaggattttaagattctggcgcagagaccgtttgacatctgcatcggagcaatcgctcagtatctgattatgccattccttgcatttgcactgacaaaggcattgaatcttccggatggaatcgctttgggactgatccttgtcggatgttgtcctggtggtgtgtcatccaatattatgtcttatctgtgtggaggagacgtagcattttccgtaggaatgacaacagtttcaacactgctctcaccagttatgacaccacttatggtttcactgctggcaagtggtacacatatttcaatcaaaggattacctatgtttgtatccattattgaaacagttatcttcccggtagcagtaggattcttacttaactatctgttaggaaaaaataaaacattcaaagaacttcagaaaattatgcctggtattgcagtacttggacttgcatgtgttgtcggcggtgtagtatcttcacagggaagcaaattctttgagtccggtgttgtaatcttcgtagcagtatttcttcataatggacttggatatctgcttggatacggagctggtaaactcacaggaatgaatacagcgaagaagagaacaatctcgatcgaggtaggtatgcagaatgcaggacttgcaacaaaccttgcaacaacaacagcacagtttgcatccacaccggagtcagcaatcatctgtgcagtatcttgtacatggcattctatttcaggaacactccttgcaggaatgtttgcatattatgataaattcaaagaggacagagaatccaagagtgtgaatacaaaagaagaagcagtatgatgtgttcgaggattgcgggaattgcatagcaatggagcaatccggttacatcagtgagtggcaaaatttacttttgacactcatatcaccgtataagaagaataattgatttagaggatggtttgacacaacgaacaagaaacgttcgaatgtgagaaaccatccttttttctgtgttgcatggtgaggaaaatcattttataataaataaggcaagggattctatctgaacataagaaagtaatcagagttcggaataaaagagaaatacaagaggggaaatgtaaatggaagaaaaagaaaatacagaaaatgcggagatgggaaaacgaaaacattctcatgatacaaaaatagtaataaagtattattatgaaaggatccgacagaacacgagaaattttctgaaatggatggggctttctgttttgacaggtctggttgtaggcggtgcgagtgcagtatttgcaggatgtatcaaggcagcaacggaatacagggatacacataattggatttttatgcttttgccggttgcaggagttctgattgtatttatgtatgagaagataggaaggcaggacggaggaacgaatcaggtacttgctacaattaaatcaaaggatgatgttccgtttctgtcagcaccattgatttttgtgtcaacattattgacgcatcttaccggcggttcggcaggaagagaaggtgcgtcgatacagtttggtggaagtattggaaattggcttggaaaactggctcatttagatgaatttgatcaccatgtgatgattatgtgtggaatgagtgcagcatttgcagctgtgtttggaacaccgatggcagcagcagtttttgcgatggaagttgtgagcgtgggggtaatgtattatgcagcacttcttccgtgcgtgattgcatctattattgcagcagagtttgcaacaggaatggggattgatccggagacatttccagtacattctatcccgggacttactgtggagacaggacttaagatggcactgatcgcagtggggtgtgggattttaagtattctattctgtatcttgctaaaaacagtggggcagttgtatacaaagtatctgaaaaatccgtatattagaattgttgttgcagcaggagtgatcattctgctcacaatatgtctgaatacaaaagattatatgggagcaggtagtggattgattgcaagagctattgaaaagggtgaagcaagaccacttgattttttatggaaaatgttacttacagcacttacgatgcgggcaggatatcgtggtggtgagattgtaccggcattcagtattggtgcaacatttggatgtgttgccggtggaatacttggattttcaccggaattagcagcggcagccagcatggttgcacttttctgcggagtgacgaactgtccgattacggcaatgctgatttcattcgaactgtttggattttcaggagcagcatattatctgatcgcgatatcaatcagctatgcggtttccggatattatagtttatataaagatcagacgattgtatattctaaatataaagcaagatatattaaccgtaaaacaagatagcagaatattgtatcagagagatacggacaggatgacaagagcaatcagttatataagtatgcgaaaaggagaggcgttttgtatagcctctcctttttaggtgtgccttgcggcgcataatttacttattgagtggtacttccacttccagtgtcgccaccagtagtgctgccggaagtatcacctgtagttgttccaccagagtctccgccggcagtggggtcggttgttgttccaccagaggaagaatccggtgatgacgttgttccggaagaatcggtacctgtagcaggtgtggtttcatcagaactctcggtatcatcttcctcagagtcttctgatggcgcaacataatgaccactacagctctttgtcggagcattgtcttttgagaaatactctgtaatagcaggacaactgcttgcggcaaggagtcctgtctctgtacaaaccgtcttttcttcgacagaggatggaatttcaaagtccttgtactcaaggccttttgtatcctggatacgttccatgatatttctccagagtttctgatgccagttctggcttaatctgtccattgtcttatgctcatcatatccaccccatacagacgctgtataataaggcgtaaatgctgaaatccacaagtcacggctttcctggctggtacctgttttagcggcaacaggcatgttgctcagtcttgcagaaccaccggttccaccggcaccgttgacaacgtcttccattgcacttgtcagaagataagcagtggagtcttttaagacttcatgtgtctcaggggttgtgttatcgagaagaacatttccttcatgatccagaacctgtgtgtaaagaatcggtttcatgtaagttccaccattggcaattgctgcataggcagctgtcatctcgatattatatacaccgtttgtgataccaccaagagctttcgcctgtgaatatttatcatcttcagtcagtgttgtaaatccaaaatcaagaagataatcataactttccgtttcaccaacatagtcagttaatgtcttaacggcaaggacgttcatagaatgttcgattccataacggacacgtgtcggaccgatatattttttatcccagttgtttacggactgtccgtttttatattcatattcttcatcatcaattgttgttgcaagagtgatctttccctcgttaagtgccggtgcataagcagcaagaatcttgaaacaggatccaggctgtcttgcagaatctgtggcacggtttagagaaagactggatttcttctcgccgcgtccaccgacgatggctttcacctgtccggtatactgatccatcacaacaacagaagcctgcggctgaggtgagagctcaattctctcatcaacagtgtctccgtcagcctcattgatattgagcgttgatttaaatgcatcaattgcttcctgtgcagattcttcagaaccgtagagaagaggagtgtcatatccccattcagtctgaatataagaagcaagttgttctttgctgtagttctcagaagaaccatctgccctgtggatagtaagtgcgtaatcaagcccatattctgtatcaccattgagataatcccctacattagcaacttcgtcatcacagatggcctgaatatcagcatcctgtgtaacgttgatcgtaaggccgccgctatagagcagattatatgcctgtgtttctgtataactcttctcagttacaagatcatctacaacctgatttatgacagcatcgatgaaataagtgtaaggtttggatgcagttgtatttgacgctgtttcggaaatgcggtcatatacattatcagccatagcctcatcgtattcatcctttgtgataaagccttgctccttcatgtttttcagaacttttttccgtctttttgcattattctccgggttgctgacaggattcagattcgacggactctgagtgatcgctgcgataactgcacattcagaaagagtcaggtctttcgcatctttattaaagtaacgctgtgcagctgtctgaactccgaggcatccctgacctaaattgattgtattcatgtatgcttcaagaatctcttccttactcatctctttttcaatctttagtgcaaggtactgttcctggattttacgttcaattcgctgatacctactctcattgatgaaattagggaatacattgtttttgatcagctgctgggttaatgtgctggctccttctgtgaaatggaagccatgtgcaacaccattaacaccggcacggataattccctggatatcaataccattatgcttgaagaaacgttcgtcctcgatcgcaacaaaagcttttcccatgtatggtgaaatctcgtcatatttcttgtaaacacggttagaatcagagtctttgagttgctcaagcaaagttccattggaatcgacaatattcgttgtatagccctgtggcataatgtcctttgctgtgacttccggtgtattgtcaatcactttttttacatatatgccaattccggctgccccaatgacgatcaaaagcagaaaacaaataatgagggctttgaaaaaacgtacgccgactcgcttctttttccttttctttttagaagaaatttgcttttttcttctagaaagattcgattttccgtaattcacgtataatatcctcctttattgacttctatgattatatcaaatttaccgatgtaaataaaggtaaatttgaaaagttcaaattttcctgaaaatcttaagaaaaaatacagttttatatagaaaagcatggtatattagataaagaaatattttcaaatatagcaaaaataaaaaaagaatgggagactgaaaaatggaaatctaccatacaatatataagggcggaaatggagaaattgttgaaaagaaatccagatttattgcagaagtgcatccggtcacatcagaagaagaagctatggagattttagagcagacaagaaagcagtactgggatgcgagacatcattgctgggcttacattataggaaggaatccggcagcagaaagaatgagtgatgatggggaaccggcaggaacagcaggaaaaccgattctggaggtgatccgtgggagagaactgacgaatgtacttgtaattgttacaagatattttggaggtacgcttcttggaacaggtggactggtcagggcttatacagcagcaacgatcgaaggattgaagaacagtgagagcattgcaaggattcatggggtgaaactcggaattgagacgaattatacggatttggggaaaatccaatatctgattgcaaatcgaaatctggatcaattagaacccgtttacacagataaggttgaaatgacagtgtttgttccgacagatgagatgggcagcctgcgggctgaactgatggaagggacaaacggtcaggtggttctggatgaagagacaacctgttggtttgcaaggacagaagatggaattaagatttttgatgaagaatgattctcatagaagatgttgttttgtgagatagaaaggaacctctgccggaatatctggcaagagttcctttcctttaagtgtgtgtcatataacattcaataaatctacttatactgaatagatatgttctatgagaattctggttcgatcagaccaaatgaaccatcttttcttttgtatactacattgacttcatcagtctcggcattggagaatacgaagaagttatgtccgagaagttccatctgaacacaggcatcttctggaaacattggtttaataccaaacttctttgtacgaacgatacggacttcatcgtcttctgttgtctcttcttctgaatcaaagaattcttttctgaagctgttacctgatggagcatatgatgtaggatgtccctgattacgagcaaccagtttgttcttatatttgcgaagctggcgttcgatgatctcttctacaagatcaatggaaacatacatatcattgcttgtctgctcagaacggataatatttcccttcactgggattgttacctcaattttctgacgtcctttttctacactgagcgttacattgatttctgtttcaggagtgaagtacctttcaagttttcctaatttctgttcgatagcatcctttaatcccggtgttacctcgatgttttttccgctgataataaatttcatgctgctcaactcctttgttcaaattatacagaagaatgattagattacttctgtatcatggttatattataacatgaaaaagattttctgtatacaataaatcgtcctaaaattatgaaaattttcaaaactttaggacgattttaaaattatcagataattaatgaatgctattttgaacagcgagcataagtttcaaacacgaatattatttattgatcgtgctgcgttttctcattctggaatccagaatctttttgcggatacgcagattttccggtgttacttcaagaagttcatcggtatcaataaagtcaagtgcctgttcgaggctgagaacacgcggaggtgtcagacgaagtgcttcatctgcgctggaagaacgtgtgttagtaagatgttttgtcttacatacgttcagttcgatatcttcagctttaccattctgtccgataaccataccggaatatactttctcaccggctccgatgaagagagtaccacgctcctgggcactgtacagaccataagttacggattcaccagtctcaaatgcgatcagagatccctgcttacgatactggatatctcctttgtatggtgcatatccttcaaagcttgtgttgatgataccatttccttttgtatccgtcatgaactcaccacggtatccgatcagtccacgtgccgggataaggaattcgagacgagtatatccaccgtttgacggagtcatgttgcggagttcaccttttctctgaccgagtttttcaataacaattccagtgaactcatcagggacatcaatataagcaagttccataggctcaagttttttgccattttcatctgtgtgatacagaacttcagctttacttactgcaaactcgtatccttcacgacgcatgttttcaataagaacagaaaggtgaagctcaccacgaccggatactttgaagctgtctgcattttctgtctcttctactcgaaggctgacatctgtgttcagctcacggaaaagacggtcacgcagatgacgggatgtaacgaatttaccttcctgtcctgcaaacgggctgtcgtttacgataaactgcatggagattgttggctcagaaatcttctggaacggaatggcttccggattctcaggagagcagagagtatctccgatggaaatatctgtgatacctgatacagcaacaatagatccgattgtagcttcttttacttctacacggttcagtccgtcgaattcatagagtttaccaatttttacgcgctgctgtttgtcaggatcatgatggtttacaacaaccatatcctggttcacggaaattgtaccgttttctactttaccaactccgatacgaccaacatattcattgtagtcgatcgtgctgatcagcatctgggtcggagcttccggatcaccttccggagcaggaatgtagtcaaggattgtctcgaacagtggtttcatatcctgtttctcgtcagagagatcaaggacagcaacaccagcttttgcagaagcatatacaaaaggacactcaagctgctcatctgaagcaccaagatcgataaagagttcaagaacctcatcaattacggcatccggtcttgcttccggacggtcaatcttattgatacatacgataacaggaagttccagctcaagtgcttttctcagaacgaattttgtctgaggcatagcaccttcaaatgcatcaacaacaagtacaacaccatttaccatcttaagaacacgttctacttctccaccgaagtcagcatgtccaggtgtgtcaatgatattgatcttaacaccattataatgaacggcagtattcttagaaaggattgtaattccacgttcacgctcaatgtcattagagtccatgacacgttcttctacttcctgattctcacggaatacaccgctctgttttaaaagctcgtcaaccagagttgtcttaccatggtcaacatgggcgataattgcaacatttctcacatcttcacgttttgttttcataatctaaacactcttccttaattatacaaaaaatatttatctgtaacataacttcattattttatcacaaaaaatgaaatttacaagaaaaagtttgaattcgatttcaagtacgaaaaaggtcgaatactttttctgtaaaaaatagttctatttcattacaataagacatacattaggtaatgacttaaaataccagccagaggaagggagaattataaattatgtcagataagattattgaaaacaaccaggtgacagttataggagaggtggtatcagagtttacatacagccatgaggtctttggagaaggtttctatatggtagaacttcttgtaaagcggttaagtaactcttgtgaccggattccggtcatgatatcagaacgtctcattgacgtaacacaggattgccgtggagaatatttaatggtgtctggtcagttcagatcctataatcgtcatgaggagacaaaaaacagactggttctttctgtgtttgcgagagaaatagaatttatcgaggaagaaccggatggagcaagaacaaatcatatacttcttgaaggatatatgtgtaagcgtccggtctacagaaaaacacctcttggaagagaaattgcagatattctgctggcagtgaacagaccgtatggaaaatctgattatattccatgtatctgctgggggagaaatgcaagatatgcttcaaactttgatgtaggggaacatgtcagaatattcggaagaatccaaagcagagagtatgtgaagaaattgtcagagacacaaacagagacaagaatcgcatatgaggtctccgtcagtaaactggagtgtgtggaagaattctaagggtggattgtttcattatttaaaactttgtgaaaaggatatcatatattgagataacaactcaaatgtgatattcttttttatatgatatttcggaaaataagagtgtgatgaaagaaaaaacaggtaatgctgatagaaagtagttctgaaaaatcatggaatacttgaggtttcatacaggaggaagatacagatggttaagatattaatgcacggatgcaacggaaaaatgggacgcatgatcacagaaattgtgaagaatgaagaagatgcagtgattgcggcaggtgtcgacaagttcacaggaattccaaatgattatccagtatttgaggagatcacacagtgtgatgtggatgtagatgtagtgattgatttttccaatgcgggagcagtggatgaattgttagattactgtgtgaagaagagtcttcctgttgttctttgtacaacagggctttcagacgaacagttaaagaaggtagatgagtgctctgagaagattgcagttcttaagtctgcgaatatgtcaatgggaatcaacctattactgaaacttttgaaagatgctgccaaagtacttgcaccggcaggctatgatattgaacttgttgagaaacaccataatcagaagctggatgcgccaagcggaacggcacttgcattggcagattctattaatgaagcaatgggaaatgaatacgagtatgtgtatgacagaagtcaggtgagaaagaagcgagacgcaaaggaaattggtatttcagcagttcgtgcaggaacaatcgtaggagaacatgaggtgatttttgcaggaacagatgaagtgattgaatttaaacatactgcatattcaagaagcgtatttgccaaaggtgcagttgaggcaggaaagttccttgcgggacagccagccggcatgtatgacatgggggatgttattcagttttagtactggatgaataatagccggtaaaccggcgggaacaagatccggtaaatagatcccggtaaggggaagatttcgggtctggaggagattgtatatggaaaatatggaaaaccgttatttagacaggctgtcggatctttatccgacaattgcagctgcatctacggagattattaatctgcaggcaattttgaaccttccgaaggggacagaacattttctgacggatgtacatggagaagatgaagctttttctcatgttctgaggaatgggtctggtgccgtgagaagcaagattgaagatgtttttggtaatacaatgagtgtaaaggacaaaaaagcactggcaacattgatttactatccgaaagcgaagatggaacaggtgaagcggacggagtcgaatatggatgactggtatcgagtgaatctgtatcgtctgatagaagtaagtaagcgtgcagcaagtaaatatacaagatctaaagtgagaaaatcactgccgaaggatttctcttatgtgatcgaagaattgattaccgagaaagcggaagtcagtgacaaagagtcttattataatgaaattatatctacgattatcaggatcggccgggcagaagaatttattgcagcaatttcagaactgatccagcgtctggttgtggatcatctgcatattgtcggtgatatttatgacagaggaccgggaccgcatcttattatggataagctgctgaaatatcattctgttgatattcagtggggaaaccatgatgttgtatggatgggagcagcggccggacagttgggctgcattgcaaatgtgatccgtatctgcgccagatatggaaacctggatattatagaagatggttatggtatcaatctgcttccactggctacatttgctatgaggatgtacaaggatgatccatgcacctgttttaaattgaaaggtactgacagaccggaatctgatgagatgcagatgaatctgagaatacataaagcgatttcaattattcagtttaaagtagaaggccagattatagagaggcagaaaggattccatctggagaatcgtgcgttactgcataagattgattatcagaaaggtacgattaatctggaaggaaaagaatataagctcctggatacaaatttcccgacaatagatccaaagaacccatataaactgacttctgaagaggaagaaattatggatcgtctggtgcatgcttttgtgggatgtgaaaaattacaggaacatatgcgtttccttcttgcgaaaggtggtttgtataaggtatataacaataatctgttgtatcatggatgtgtaccgttagatgcgaaggggaacctgaaagaagtagaaattttcggaaagaaatatcgtggaaaggccttgtatgatgtgttggaaagttatgtgagaaaaggattttttgcattggatccaaaggagcgggaagatggaaaagatataatgtggtatatctggttacatccggattcaccgttatttggaaagaacaagatggcgacctttgaaagatatttccttgcagagaaggaaacacatacagaaaagaaaaatccatactatgccctgcttgaaaatgagacagttgtggataatatcatgatagaatttggattggatccaaaagaggatacacacattgtaaatggtcatgtgccggttaagagaaaagatggcgagagtccgatcaagtgtaatggtaaagtaatggttattgatgggggattttcaagagcatatcagaaagaaaccggaattgcaggatacacgctggtttataattcgtatggattacttttggtagcacatgaaccatttgagtctacagaagcagcaattaagaaggaaaatgacattcattcagagacagtagtagtgaccagagtgaacgagagacgtcttgttggtgacaccgacgctggaaggaaattaaaagaacagattaaagatcttgaatggctgctggcgtcgtacagaaatggtcagattatagaaaaactgtaaataattgtttatgctgatatagcctccggcaggattgcagaggtgcgcagtagaagtatgtcatgcaattgcatgacgcgcacctcgcagcaagaatgccgaggcattcttgaattaggactgaagatagaaaggattactagaatggaaaaagacttaaatcttccggaaggaacagaagtaacagaaccgctgaaaatctatctgaatgagattggacagatccctttgctgtcagaagaagaggaaagggaccttgggtgtaaaagtgcttcaggagatgaggatgcaagaagaaagctggaagaggggaatctacgcctggtggtatctctcgcaaaacattatactggaagagggattacactcatggatctgatccaggagggaaatattggtctcatgcatgcagcagagaaatatgattatacaaaggaaaatcgattttccacatatgcatcctggtggatcaaagaagcaatgcagcgggcaattgatcagcagtcacgagaaatccgtgtgccggttcatgttgcagagaatatgaagaaagtacagaaaatttcaaaagatcttcagcagaaatttggaagagaggctacaccggaagagatagcagaagagatgaaggataaatcaccggaatttgtaaaagagattttgtcatatcttcagaatccggtttcactggaaactccggtaggagaagatggggagaataatcttggtgatatggttgaagataaggatgcaacgacgccggaagatgctatgaatcagcttgtgcaaaaagaagaagtacaggaattgttagagtcccttaatgatagagaacgtcaggtgatccgtttgagatttggtctggaagatggaaaaacacatacgttggaagaaatcggtgatgaactgaatgtgacaagagaacgcgtacgccagattgaagccagagcgatggagaaacttcgcagcaaagcgacaaaactgtaaaaaatttcttttgaataaatattgaaaaattgcagatagtaaagacacaatatttatttgaaaggaagacaaaaatgaggagaataagaaaattgcttgtctgtgtgatgtgcgtactgatgctttgcagtctcgctggttgtggaaacaacacaggaacagcgaatgacaatctcaatgatgcgacatccggtgaaaactatgatggaagtggagaaaatggtaataataccggaaataatgcgggagaccagaatggagatagtatcctagatgacgcggttgacgatgtaacggatggcgtggatgatgttacagacgatatcacaaatggtgtcgatgatgcagccgatgatctgacgcaggagaatggcgtgcagaacaagatgcagaataacgagtgatcaatatgccgtaggccggaaacggaactgcggcatttttctaaaagaaggagagacaggatgagattcagaccatgtattgatatacataatggaaaagtgaaacagattgtgggcggaagcctgaaagatgaaggaaatcaggccagcacaaactttacgtcagaactggatgcagcatggtatgcaagacagtatcagaaagatcacctgaaaggcggccatataattcttttaaatccagttggatcagaatactacgaggcgacgaaaaagcaggcgatgggagctctggcggcatacccgggtggaatgcagatcggtggtggaattacagcagataatgcacaggaatatctagattcaggagcaagtcatgtgatcgtgacttcttatgtgtttcaagacggaatctttcatgaagagaggcttcagaaactggtggctgcagttgggaaagaacatgtggttttagatcttagctgcagaagaaaagatggtaaattttacgtggttacagaccgctggcagaagttcacagaacttgcattatctcacgaggtgttaaatgatctttcaaaatattgtgatgaattcctgatacatggtgtagatgtggaggggaaaggtgccggaatggaaacagaattagtaaggatgcttgggagctgggacggaatcccaatcacttatgccggtggaatcggatcaatggaagatctggagagatttcgaaaagagagcggcggaaaagtagactttacaatcggaagcgctcttgatctgtttggcgggaaaattccatatgcagaagtttgtagttactgttcactcccgtgttaatcactccgcttgtaaatccgcagaatgttaacactctatgaagttgttgaattcaagagcggatagtgatagaatgtagaacagagtggaatttcagaccaaaatcaaaattcagagaaggagtaattgcggaaatatgaatattatagaaaagattttcggaactcacagtgagaacgagctaaaacgaatttatccgatcgtagaccgcatcgaggcactggggccggagatggaggcgctttcagacgaagaacttcgaggaaagacaaaagaatttaaagaacgactgaaagagggagagactctggatgatatccttccggaagcatatgctgtagtaagagaaggtgcttacagaagtcttggaatgcgtcattatagagtacagttgattggtggtattatcttgcatcagggacgtatcgcagagatgagaactggtgaaggtaagacacttgtgtccacacttccggcatatttgaatgccttggacggaaaaggtgttcacatcgtcacagttaatgactatctggcaaagcgtgatgctgagtggatgggaaaagtacatgagtttttaggactcaaagtcggtgttgttctcaatgagatgaacaatgacgagagacgagaggcttataattgcgatattacttatgtaacgaataatgaacttggatttgattatctgagagataacatggttatctataaagaacagctggttcagagaggattgcattatgcagttatcgatgaggtcgattccgttttgatcgatgaggccagaacacctttgattatttccggacagagtggaaagtctacagctttgtatgaagcctgcgatgttcttgcaaaacagctggagcgaggtgaggcaagcggtgaattttccaagatgaatgccatcatgggagaagaaattgaagagacaggtgatttcattgttgatgagaaagagaagacagttaacctgacagaagatggtgtgaagaaagtagagaagttcttccacatcgaaaaccttgctgatccggagaacctggaaattcagcataatattatccttgcactcagagcacacaatctgatgttccgtgatcaggattatgttgtaactccggatggtgaagttatgatcgtcgatgagtttacaggacgtatcatgccgggacgtcgttactctgatggtctgcatcaggcaatcgaggcgaaggaacatgtgaaggtaagaagagagagtaagactctggcaacaatcacattccagaacctgtttaataagtatgacaagaagagtggtatgacaggtactgcgatcacagaggagaaagagttccgtgatatttatggaatggacgttgttgaaattccgacaaacaggccggtacagagagtggatcttgaggatgctgtttataagacaaagaaagaaaaatacgaagcagttgtagaagctgttaaagaagcgcatgcaacaggacagccggtgctggtaggtacaattacaattgaagtatccgaacttctcagcaagatgctgaagaaagagggaatcaagcataatgtactgaatgcaaagtatcatgagcaggaggctgcaattgtagccgatgccggacttcatggagcggtaacgatcgcaaccaatatggctggccgtggtactgatatcaagctggatgatgatgcgcgtgcggcaggtggcctgaaaattatcggtacagagagacatgaatcccgtcgtattgacaatcagctgcggggacgttctggacgtcagggagatccaggagagtccagattctacatttctctggaagatgatctgatgcgactgttcggttcagaaagactgatgggaattttcaatacacttggtgtagaagacggtgagcagattgaacataagatgctttcaagtgcaattgagaaagcacagaagaagattgagagcaataactttggtattcgtaagaatctgttggagtacgatcaggtaatgaacgagcagagagagattatttacgaagagagacgccgtgttcttgatggagaaagcatgcgtgatacaatctacagcatgattacagaatatgtggaaaatatgacagatcgtttcgcttctacagaggcagatccggaagagtgggatatcaaaggattggatgtgaatcttcacaatgtgattccacagcttcagctcccatctgagaaggaatgccagagtatgagtcagaaggagttaaagcatcttctgaaagaacgtggagtgaaggcttatgagaacaaagaagcagagttcccggaggcagagcagcttcgtgaagttgagcgtgttgtacttctgaaagtgattgatgcaagatggatggatcatatcgatgatatggatcagctgcgtcagggaatcggtcttcaggcttatgggcagagagatccactggtagagtacaagatgacaggatatgagatgttcggtgaaatgacaaatgcaatcgctgaaaacacgatccgtacattattccacattaaggttgagcagaaagtggagagagaagaggttgcaaaagtaactggaacaaacaaagatgacagcgcagtccgtgcaccgaaaaagcgcgaggagaagaagatttatccaaacgatccatgcccatgcggaagtggaaagaagtacaaacaatgctgtggaagaaaaaacaaataagctgaacagttacaataatttaaagtatgtatatgaaagaggtgattaaggtggttttactggatgaactgaagtcaagactgactgcatatgaagaaccgctgaaagatttgagggattcactttgacctcgcttcaaagaagcttaggatcgaagaattagaaaagagactggaggaaccaggattctgggatgacccggaggtttcccagcatgtaatgaaagaattgaaaggtcttcaggattctgtaaaagagattgaaaaattatttacagattatgaagacatgcttcttctgattgaaatgagtgcaggagaagacgaggagcaggaagccgcagaagagattgaagaggaacttggaacatttgaggaagtctttgagaaactgcgaattagcacacttctgatcggaccgtatgatgcagataatgcaatcgtgacacttcacgcaggtgcgggcggtacagaggcaatggactggacaagtatgctctatcgtatgtacagccgctgggctgaaaagagaggatatgaagtcgaggtgctggactatctggaaggagatgtagcaggtatcaagggagttacttttgaggttaagggagaaaatgcttatggctatctccgttccgagaaaggtgtacatcgtctggtacgtatttctccatttaatgcaaatggaaaacgacagacatcatttgcatcctgtgatgtaattccggatattgaagaagatatcgatatcgagatcaacgacgatgatatccgtgtcgatacttatcgttccagtggtgccggcggacagcatatcaataagacgtcatctgcaatccgaatcacacatcttccgacaggaattgtggttcagtgtcagaatgaacgttcccagcacatgaataaagataaggcgatgcagatgttgaaatccaaattgtatgtactcaaacagcaggaacaggcagagaagatgtcagacatccgcggagaggttagagatattaatttcggaaatcagatccgttcttatgtcatgcagccatatacacttgtcaaggatcacagaacaaacgcagaaatcagcaatgtaggtgcagtaatggatggaaatattgatccttttattaacgcatatttgagcatggatgcagaagcacagaaaggaaagaaagcagaatgataaatgtagcagtaatgggatacggtacagtaggatcaggagttgtagaggtcctcagaaccaatggtgaactcatcaatgaaagagctcaggatgtgataaatgtaaaatacgttctggatctcagagattttccgggtgatccggtagaagagattctgacacatgatttcgagacaatcgtaaatgatgcagaagtagacattgttgttgagacaatgggaggtatagagcctgcttatacatttgtaaaacgttgtctggaagcaggtaagaacgttgctacatccaacaaagctctggtagcaaaacatggagcagaacttcttgagattgctcgtgacagaagtatcaattttatgtttgaagcaagtgttggtgggggtatcccaatcattcgtgcactgaattcctctctgacagcagatagaatcgacgaagtgacgggaatcctgaatggaacaacaaactatatgttgacaaagatgttctttgagagtgctgattatgatgaggtgctcaaagaggcgcaggagaaaggatacgcggagcgtaatccggaagcagatgtcgagggacatgatgcgtgtagaaagattgcgattctgacatctctgatcgcaggacaacatgtggattttgagacaatccatacagaaggaatcacaaagatcacaacagaagatatgaaatatgccaagacgatggatatggcaatcaagctgcttgcatccagcaaaagagaaggggaatctttctctgcaatcgttgcaccgatgcttctttccaagaatcatccgctgtgtaatgtgaatgatgtatttaatgcaatttttgttcgtggaaatatgcttggtgatgcaatgttctacggaagtggagcgggtaagcttccgacagcaagtgctgtagttgcagatgttgtagatgctgcaaagcaccttcacagaactgttgtaacaagatgggagagtaacacactcgaacttgttccgaatgcggatgcgaagagaagattcttcgtcagaattcatggagaagaatctgtactcaaatcccgtgtggacgaagtgttcggacaagttaaatttgtcaaagcagatgatgtcgagggagaattcgctgttatcacaggcgagatgaccgaggcggagtatgcacagaaggcagaagagatgccggaagttgtgaagatgatccgtatggcagattaatttgtatttgcttcattggattctgaaagtatagtagaaagagccagagcaggtaccatatatggtaactgtcctggctcttgtgttacatacggctcagtgtactgttatggtacgcagaactaaaggtaacgtcctctcccagccattgaggtgcgggataggtgttagctgtttcttcgtccgggaattcaatttcggcgagaatcagtggagcaaggtcatcatggaagatatctaattcaagaaaaagcggagtggaacagaagtctgcgttttccgggcagacacaactcataggaatgacatagcgtgttttatgaatgatgcgtccgtcgactttttcttttagatgctcataactttctttggtaagaggaaggttatattcttcacgggtcataagccctttggatttgtaggtgagaacataatcgtcatcctctctgcgtatccttacgacaggagcagtgcataagtagccttgttccagctctttgtgtggataatcgaaaggagaaaatggcagtttttcaagcttttgtattaaaaatttgcgttctatttccatagttaaaggatcctcctgatgttgattagttatactataatacgtgaaatgcaaaaaggcaacggtgagatgaggaggcaggcaatttattgactaaaaatagaaattttaaagtagagtcaatactttagaataacgagatatgtatcatcttgacgaataacttatcctggcgttaaaataaaatcattgttgagatatcatcggaaagcgaggaagtattggatgaagaaagtagttgtatttttagcagacggttttgaagaagtagaaggtttaactgtagtggatcttttgagaagagcaggagcggttgtagaggcagtttctgttatgggaaaactgcagattgacggagcacatggaatacaggtggaagcggatgaattgtttgagaaagcattttttgatgacgcagaacttcttgtacttccgggaggtatgccgggaacactgcatctaaaagagcataaaggtctggcagacttactttgcaagttcaatgaaaagggaaagagaatcgcagcaatctgtgcagctccgactgtattcggagcacttggattgttgaaagagaaagcagcatgctgttatccggggatggaagaacagttgaattgtaaagaagcaaagttctgttcctttgtcacagatggaaatatcacaacaagccgtggtgtgggaacagcgataccattcgcactggaactgatccgtcagctttttggcaatgaaaaagcttctgaaatagcagaatctattgtatatgaggaataaaattagaaaaagtagtcagaaaaatgtaaaaaaacatgtaaaagatataggaaagtggaaaaaacactggaaatatgagactttatatgctatactgtttcaatgactgcgaatgtatacttttaagaaattaattcgttcgataagtaaagaatttgcttataaacaaggaggaagaaaatgagtttacaggtagaaaaattagagcataatatggcaaagctgacaatcgaagtttcagctgaagaagtagagaaggcactgcaggcagcttacttaaaagagcgcagcaaaatcagcctcccaggattccgtaaaggaaaagttccgcgtcagatgatcgagaagatgtacggaccggaagtattttatgatgaggcagcaaaccgcatgatttctgaggcatatgcaaaagcatatgatgagagtgaacttgagattgcttcccagccgacaattgatatcgttcagcttgagaagggaaaatcattcatcttcacagcagaagttgcagttaaaccggaagttaaacttggagagtacaaaggacttaaagttgacaaatactctacaagagtaacacagaaggaagttgacgaggagatcgagaaggttcgtgagcagcatgcaagaatcgttgaggttacagacagagctgtagcagataaagatgatgttacacttgatttcgaaggattcgttgacggtgttgcattcgaaggtggaaaaggtgagaactatccactgacaatcggatctggttctttcattccgggattcgaggagcagctgatcggagctgagatcgacaaagaagtagaagttaaggttacattcccagaagattatcattcagaagatctgaagggtaaagaagctgtattcaaatgcacagtacacgcaatcagagcaaaagagcttccggaagtagatgatgagttcgcatctgacgtttccgagaaggctgagacacttgatgcttacagagcagaagtaaaggcccagatcaaagagcgtaaagagaacgaaggaaaggctaagaaagaagatcaggctgtagagcaggcagttgctaatgcagagatcgatcttccagaaccaatggttgaccttcaggctaaacagatggctgatgattttgcacgccgcattatgcagcagggactcagcgtagagcagtacttccagttcacaggtctctcagaagagaagatgatggaagagcttaagccacaggctgagaagagaatcagaacaagacttgttcttgaagcaatcgtagcagcagagaatattgaagtatctgatgagcgtcttgatgaagagttagctaagatggctgagtcttacaagatggaagttgagaagctgaaagagttcatgggtgagaacgagaagaagcagatgaaagaggatattgcagtacaggatgcagttactctgatcgttgatgcatctgtagaaggctaatcatttattagatttcttgagagggtgcgcctgtatatcaggtgtgccttttctctttctataagaagtgagaggatgaggactgattcgggagtaaggatcagaacaataattatgcgttgctggtaataactattgcaaatagcgacaatcatatagaaaaggaaggatagcatatgagtttagtaccttatgtcattgagcagacaagccgcggagagcgttcctatgatatttattcaagacttttaaaggagcgtatcattttcctcggagaagaagtaaatgatgtgtcagcaagcgtgatcgttgcacagcttctgttcttggaggcagacgatccggataaggatatccagctgtatattaacagcccgggaggatctgtaacagcaggtctggcaatctacgatacaatgcagtacatcaagtgtgatgtttcaacagtatgtatcggtatggcagccagcatgggcgcattcctgctttccggtggaaagaaaggaaagagatttgcccttccgaacgctgaaatcatgattcatcagccatccggtggtgcacagggacaggcaacagagattcagattgcagcagaacatattcttcgtacaaagaagaaattgaatgagatcctggcagcaaatacaggaaagccgctggaagtgatccagcaggatacagagcgtgacaatttcatgtctgcagaagaggcgaaagagtacggtctgatcgacgaagtaatagtaaaccattaattggttattgaggtgacagaatatggcaggaaaaaagactgaggatatcgtaagatgctcgttttgtaataagacacagtcccaggttcgtaagatgatcgcaggaccgagcggaacctatatctgtgatgactgtgttgctatttgtaccgagattattgaggaagaattagattttaatgacagagctgcacttgacgatattaatctcctgacaccggaagagatgaaagcttttctggacgaatatgtgattggacaggatgaggcgaagaaagttctttctgttgcagtttacaatcattataagagaattctggcagaacaggatcttggagtagaacttcagaagagtaatatcctgatgcttggaccaacaggatgtggtaagacacttctggcacagacacttgcgaaagtcttgaatgttccatttgcaatcgcagatgctacagcactgacagaggccggatatgtaggagaggacgttgaaaatattctccttaaggtgattcaggcagcagacggagacatcgagcgtgcagaacacggaatcatttacattgatgagattgataagatcacaagaaaatcagaaaatccatccatcacacgagatgtttccggagaaggtgttcagcaggcacttttgaaaatcatcgaaggaacagttgcgtctgttccaccgcagggcggaagaaagcatccacatcaggaattgatccagattgatacaacgaacatcttgtttatctgtggtggtgcttttgaaggaattgataagattattgagacaagaatcgatagaaaatcaatcggattcaatgcagagatcgcatcaaaacatgagtacgatatggatgtacttcttcaggaagcacttccacaggatcttgtaaagtttggtttgatccctgagctggtcggaagacttccggtgacagtatcattggatcttctggataaggatgcattgatacgcattcttacagagccaaaaagtgcgatcgtaaaacagtatcagaagcttctggagttggatggcgtgaagcttgaatttgataaagatgctctgttagaaatagcagagacaacattgaagcgtaagacaggtgcgagaggtctccgtgcaatcatggagaatatcatgatggatacgatgtttacagtaccgtcagataagacaatcaaggaatgccgcattacgaaggaagcggttcttggagtggaagaaccgaagtatactcgtgatagtgaggaaagaaaatcattcctgacatctgagagcaaatagtaactggatacaggaatcctgcaaacagttgcggagtataaaacgaggcgggagtgatgggagtaccatcctacccgccttttctaacgaggaggaattgaattggacaacgagacaagaagtctccctatggttgccttaagaggattaacaatcatgccggagatgatcgttcattttgatgtgagcagagaacgctccatcgctgcaattcaacaggcaatggttgaagagcaggagatatttctggttgcccagaaatcaatagagacagagaaccccggacaggatgatgtctatgagactggaacagttgcatctgtgaagcagctgatcaagctgtcaaagaaagttgtaagggttctcgtggaaggaaagaatcgtgcggttcttaagaaaattgaagagacagatccttatcttcgtgcagaagtagaagttctggaagaacaggagatcacgattccggatgatctgaatgcggaagcaatgatgcgcggattgaaggaaattattacagaatatgcagcaaagaatggaaagatttccaaagaatctgttgcagaaattcttgatattactgatttaaaacgtctggtaaatgaagtggctgcgaatattccattgaagtacaaggatcaacaggaacttctggaagagctggatttctggagcagatatgagaaattatcattgaagcttgtgaatgagatgcagatcatggaaatcaaagaagaacttcagagaaaagtaaagagcaaagtagataagcatcaaaaagaatatcttttaagagaacagctgaaggtgattcgcgaggaattaggtgaagatactacattttcagatgcagatgagttcgaagaagcatgtagcaaattagatgcaccggaagaagtaaaagaaaagctccataaggaaattggacggtttaagaacacgatcggttctcaggcagaaaatggagtaatccgtacttatattgagacaatcctggagatgccgtggaataaacgtgcagaagataatacagatattaactatgcgaaagaagttttagaggcagatcattatggattggaacaggtgaaagaaagaatcctggaattcctggctgtcagaacactgacacagaagggggaaagtcctatcctttgtctggtgggacctccgggaacaggtaaaacttctattgcgaagtctttggctcgttctcttaagaaaccgtttgtgcgcatttctttaggaggagtacgtgacgaagctgagattcgcggtcaccgcaagacttatgtaggggcaatgccaggaagaattgcaaatggaattcgcacagcaggtgtgaagaatccggtactccttctggatgagattgacaaagtaagtacagactataaaggggatacgttctctgcacttttggaagtactggacagtgagcagaacagtaagttccgcgatcattatctggaagtgccactggatctgtcagaggttacatttatcacaacagcgaataccttacagacgattccaagaccactcctggacagaatggagatcatcgagattacaagttatacagaaaacgagaaacttcatattgcaatagaacatctgattccaaagcagctggaaaagcatgggattacagacgaacagctcagctttagcaagaaagcaatctggaaaatcgcacataactatacgaaagaagcaggtgttcgtcagttagaacgtgaaatcggaaatatttgccgtaaagcggcaaaagagcttcttacaaccgagaaagagaagattactgtgacagatagaaatcttcataaattccttggaaaagagaaatattcttatcagatggcaaatgcagcaccggaggtcggtatcgtacgtggacttgcatggacaagtgtcggaggagatacgcttcagattgaggtgaatgtaatgccgggtaagggagagatcatgctgacaggacagcttggagatgtaatgaaagagtccgcccgtgccggaatcagttatattcgatctgtaagcaaaaaatatgcaatcgcagaagatttcttcgagaagcatgatattcatgtgcatattccggaaggtgcagttccgaaagacggaccatcagccggaatcacaatggcaacagcaatgctttctgctgtgacaggcaagaaagttcgcgcagatctcgcaatgacaggagaaatcaccttgagaggtcgtgtacttccgattggaggattgaaagaaaaacttcttgctgctaaaaatgcaggaatacagaccgtgcttattccaaaagagaacacagcagatgtggaagaactttcttctgaaattacaaaaggattggaaatcattccggttgagacaatggaagaagtcttaaagaaagcactgacaagataaaaagattgcttctgacagcagattgcaataaaatagaatgaaaggaggagtaaacgacatggtcattaaaaatataaatctggaaacagtttgtggaatcacaagcgttcttccggaaaacgataagcctgagatcgcatttgcgggaaaatcaaatgtaggaaaatcatcactgattaatgcactgatgaaccgtaagtcttatgcaagaatttcagcaacaccgggaaagacacagacaatcaatttctatacgattaatgaggaaatgtatctggtcgatctcccagggtatggatacgcaaaggtttctgagcaggaaaagattcagtggggaaaactgatcgagcgttatctgcatacatcaaaacagcttaaggcagtattccttttgatcgatatccgtcatgatccatctgcgaatgataaaatgatgtatcagtggatcctggatcagggatatcagccaatcattatcgcaacaaagcttgataagattaaacgcagtcaggtacagaagcatattaaaatgttgaagacaggtctgcagcttgttcctggaacaaaagtaattccattctcatcccagacaaaacagggaagagatgagatttgggaattgattgagaaagaatatctcggatatggaaatgacgagggggcagaggatgacaaataagcgcccatactggcaagttgccgtaagcttgcttttcagcatagtagcaacagttggatttgtactgatcggatggaaattacttggatttctcatgccgtttgtggttggatggatcattgcatccatcgccacaccggttgttaactggttagaaaaacgtttgaagatcagaaaaaaattaggctccgcattgattattatcggagtcctggcgttgatggggacgctgggctactttgctgtcagttggctggtttcagaagtcagcagtctggtcaaagactttccggaaatgtatgtgcagctcgaaaaaggactccatcaaattggaatttctatgtccggaatttttagcaaactgccggatggaatccagaatggatggacgacaactgttgcgaatttggatgacacgatgggaaatctgatgtcaaaaatcagtgagccaacggtaagtgccgcaggaaatatcgcaaagcgtgtgccaagttatctggtatcaacaatcgttatggttatgtcttcttatttctttatctcagagcgagaagaagttgtgacatgggtcaaacagattgcgccaaagtcagtaactgaacgaatgatcatggtgatagataacctgaaatatgcggttggtggatatttcaaggcacagtttaagatcatgggaattgtatttttgattttggctgtaggacttggatttttgagagtccattactttgtattgtctgcatttttgatcgcatttctagatttcctaccattttttggaacaggaactgcgatgattccatgggctatatatgcagtctttatgggagattataaacgtgcgattatgcttgttgtgatctatgcaattacgcaaatcgtcagacagctgatccagccgaagcttgtcggagacagtgtcggattgaatccgctggttacactgcttttgatttatattggatatcgaattggtggtgtgatctggatgatccttgctgttccggttggtatggtcattataaatatgtgtcaggccggtgcgtttgattatatttttgatgatatgaagacgctgattgtcggaatcttgaaattaagagacgaagagtagtgtagttaagaaacaagaaagtaattgaaaggagaaaaatatatgagcaattatgatgtaattattatcggtgcaggacctgggggaatctttgcagcttatgagctggcagagaaagcgccggaattgaaggtggcggtatttgaagccggcaatccactggagaagagaaaatgcccaatcgatggaaagaagattaagagctgtgtgaactgcaagacatgcgcgattatgagtggattcggtggagcaggagcattttcagatggaaaatacaatatcacaaataattttggtggaacattgtatgagtatatcggtaaagagacagcaattgagctgatgaattacgtagatgagatcaatgtgaaatttggtggtgagggtacaaaaatgtattccacatcaggaacacatattaagaaactttgtatgcagaataagctgaatcttttggatgcatctgttcgtcatcttggaacagatatcaactatgtcgttcttgagaatctctatgcaaagttgaaagatactgtagagttccgttttaactgtcatgtagatgatgtggaagcgattgacggcggatatcgcgtgattacaaaagatggtgtagatgaatgtaagaaatgtatcgtttctgtgggaagaagcggaagtaaatggatggaaaaagtatgtgaaaatctcgatatcacaacaaaatccaatcgtgtagatatcggagtccgtgtggaacttccagcagttattttctcacatcttacagatgaactgtatgaaagcaagattgtctacagaacagagaagtttgaagataaagtcagaacattctgtatgaatccgaatggaatcgttgtaaatgagaatacaaacggaatcgttacagtaaacggacatagctatgaagatccggcgaagcagacagagaatacaaactttgcgcttcttgtggagaaacatttttcagagccgttcaaagacagtaatggatatggtgaaagtattgcacgcctgtctaatatgcttggaggtggcgttcttgtacagcgctttggtgatctgatccgaggaagaagaagtacaccggcacgtattgcagagagttttctgacaccgacactttccgcagaaccgggagatttgagccttgtattgccgaaacgtattcttgatggaatcattgagatgatctacgctttggataagatcgcacctggaacagcaaatgatgatacactgctctatggtgtagaagttaagttctacaatatggaagtgaaactggatgaacatcttgaaacaaaacacaagggcctgtatgtgattggagacggaagtggagtgacacattcattgtcccacgcatcagcaagtggtgtgttcgtagcaagagagattgcagaagaagtgtaaattgatagaagttaatagttaaaataaaggggagtttttcatttgcagaaattacatgaagtgtgtatgtgtattgcaggtgaaaaacttcccttttttcttatgtataaaaaagaaacttgagtttttgttgtttttacaaataaaacagttggattttgttgattcttaattaaagcgtgttgagatttattggaatctccttgacagaaaggcatatagatagtattatttatagtaagagagtttatagctgagactgggttactgttcactcccgtgtcaatcacttcgctgattgacacggaggatgcatgttttggcttgaatgcatctcgccccatcgccaaaggcgatttaaaatggcgagatgtgttgctggtcacatcgtgtgaacagtaacgagactggctgtgaacagagaatgttagtggattaacatacaggattgtatgaatgagaattacagaatctatgtgaaagagaggaactgacagatggcgaatgatcacggagaacagattagaattgtacaggaaacagttgcaggtaaggagattacatttgcacatgtaatgggaggtccggctccgattatttatcagaaactcggattaaatccacatctggattatcgttcttctgcaattggaattatgaatatgactccaccggagtcagcagttatcgcatctgatattgcagtgaaaagcggtaatgtttatcttggattcgcagaccgttttacaggcacactgattattacaggagagatttctgatgttacatctgcattgacagaagttgtggattatttcagagattctcttggttatgtagtctgtgatattacaaaacgataggaagtgcgcttatggaacgggaacgtataacgagagaagagctcatggagcgtctgtttcatgatgactatgagaatctgaaaggaaagaagcttcgtatgactcgtgtgcgcgtgccggggaaggaagtctgcatggcgcatattatcagtagatcagatgaggttatttaccagaatctgggattacatattggaactcatgaaggtgaggatcacacaggagagtctatcggacttctgcgttttacaccgtgggaagcagttgtggttgctgcagatgtagcattcaagagcgcagatgttgagattggatttatggacagattctgcgggacactgattctgaccggcggattgacacaggtacagacagcggtggaagaagtagttcgattttttaatgagagacttggctttgcagtgtgcgaggttcatagaagttaagaagacagaggcgtaacaggatgaaaaagatatttttgatggggagaagtgaagcggggaagacttcactgacgcaggctcttaagggagaagaactgcattatgtgaagacacagtatacgaatacagaagatgatacgatcgactctccgggagagtatgcagagtctaagcatttcagtgttggacttgcctgtttttcatttgaggcagacgtgattgctatggtgcaggctgcagatgaaccgttcaatctgttcggacctggaagcagatgttttatccaacgtccattgatcggaatcattacaaagattgattcaccgtacgcaaatgttgatatggtgagactttggatgaagaatgccggatgtgagcgcattttcgaagtaaataataagacgcgggaaggtatcaaagagctcatggattatctgaatgagcctgtggaaatactgacattggatcgtgccagatataaacagtcattgggattgaatgactgggatccactaccggaaggagtagagtatccggatggcatgtagatatcaaaagattaaggtgactgttcagagccaaccttcaaaatgctacgcattttgaaggtgtggcgtatccgccaaataaaatttcaaaaaccgtcttaaaaatgcaagcattttacatctatttttgaaattttgcttggctctgaacagttacaaattaagaaaaatatccctcttgagatatttctggaagatgaaatatgctataatgattatgtagcaatcagttcgatcaacagaatgacatcaggagggatttttatgttgtggacaagaagtgaattaaagggaagagcaaagttcctgttgaaacagaattattggtattctgttcttgcagcattgatttatacatttcttttgggaaatggatttacgcattcttataatgtactaaaaaataagaatagtgaggtggaaacttcgatacaaggttttcatccgatcctaatgtttgggattgcagcaactgtagcagttgtggttgtaatttcatttattgtatatctggctattgcctatttcctatggaatccaatgactgtcggctgttgtaaatttttcaaaaatggaagagacggaagacaggatgtgaaagatattttccgtatggtaagagattgcaataagacagtacgtatgacgatgcttctgaaaacaatttatcttacattgtggtcactgttatttattgttcccggtgtgatcaaaggatatgaatatgcaatggtaccgtatcttctgctcgaccatccggagatgagcagacaggagatttttgcggagagcaaacgaatgatgatggggaataaatgggatgcgtttgtgctggatctttcctttatcggctggcatttgctgggggcatgtacgtttggaatcttaactttcctttatgtaaatccgtatcagtattatacagaggcagagttgtatcatgtgctgagagatagaatgtaaatatagattcatattatgaaacttagaataaaaagttcacggctggttgtatatgatcagctgtgagcttttcttttgcaaaataaaaatagaagacaactcaatattttctattgacattaaaaaccaatgtgataaacttgtttatgtgggaactgttcacaaatgaacaattcactggtaaacagttcctgcgtgtgaagatagaaaggaggattacaattttgtgtgaagaacattttcatatcggtccacaggtacataaaatggatcgttccatttcaaaattacttgaggcgagagtaaaagcggaagggttggatgaagtaacccttatgcatggatggattttgcgttatctctatgaacatcaggatgcagagatttatcagaaagacatagagaagtatttcggaatctgccgttcgggagtaacgaatatcattcaggctttagagaagaaaggacttgtctgtcgtgcttcggttgcgagtgatgcaaggttgaaaaaggttatgctgacagaggcaggacgcgaaagtcacgaaaagcttggagagattttcaagcgaatggacgcagaactggaagaaggaattaccgaagaagaattacaggcatttttgagagtgactcataaggttcatctcaatctaagaaaaatgagaggagagaattcatgattcgtactttattaaaagaagtaaaagagtataagacagcatcgatcgcgacaccgattttcatgattcttgaagttttatttgagacattgatcccgtttttgatggcatcgatcattgataaaggggttaatacgggtgatatccaccacatttataaagtgggtggaatcatgatcgtagcagcatttttaggcctgcttgccggaatggcgggaggacgttatggagcaaaggcttctacaggtttcgcaaagaatttgagaaatgcaatgtttgatcggattcagacatattcgtttgcaaatattgatcatttcagtacagcaggactggtaacgcgtctgacaacagatgtaacaaatgtgcagaatgcgtatcagatgatgttacgtatgatgatgagagcaccggcaagtatggtatgtgcgatggtgatggcacttgcaatcaatgcaaggctggcaagtatttatcttgtggcagtcttgattcttggaattattttgttttttattatccgtcatgcaactgcatatttccaacaggcatttccgaaatatgacgcattgaatgagtctgttcaggaaaatgtttctgcaatccgtgttgtaaaggcatatgtaagagaagaggaagagacaagtaaattcaaacgcgcaagtaagaatatttatgatatttttgtaaaagcagagaagaatgttatctggaatgcgccgatcatgatgtttacagtttatacctgtatcattttaatcagctggtttggtgcaaagatgattgttgtggattctcttacaaccggagaactgatgagtcttcttgcctattgtatgaatattcttatgagtcttatgatgctttcgatggttttcgtcatgatttccatgagtatggcaagtatgcgccgtattgcggaagtgctgaatgaaaaaacagatattcacaatccagagcatccggtatatgaagtcgcagacggaagcattacatttaaaaatgtagacttttcttataagaaagacagtgcagagaaggttctcaaagacatcaatctggagattcgttccggagaaacgattggaattatcggaggaaccggaagtgcgaagacaagtctggtcaatctgatcagccgtctgtatgacgtcacggacggagagattctggttggtggaaaaaatgtaaaagaatatgatcttgaggtgctccgtaaccaggtgtctgtagtgcttcagaaaaatgtcttatttacaggaagtattttagacaatctccgttggggagacaaagaagcgacagatgaagagtgtatccaggcatgtaaactggcctgtgcagatgaatttatcgagcgcttcccggataaatataatacgcatattgaacagggcggaaacaatgtgtccggtggtcagaagcagagactctgtattgcaagagcattgctaaagaagccgaagatcctgattcttgatgacagtacaagtgctgttgatactgcaacagatgcgaagatcagacgtgcattccgtgaagagattccggatacgacaaagctgatcattgcacagcgtgtatccagtgttcaggatgcagaccgtattattgtgatggatgaaggaaagattcatggattcggaacacatgatgaactgcttgtgtcagatgagatttatcgcgaggtatatgagtctcagacacagggaggcggagattttgatgaaaatggaggtgaagcataatgcgcggaccaatgggaaaaccaaagaatagagtggaaaatcctgggaaattacttaaacgtctgatggattatattttccgggattataaatttcattgcattatagtattcatccttatttttgtaggagttattgcaaatgttcagggaacaatgttcacaagagatttgattgataaatacattacaccgttcttattgtccagtgatacaccgaactttacaccgcttgcacatgcaatcggaaaagttgcttgtttttatggagtcggaattgtggcaacttatacttataaccgaattatgatcaatgtgacacagggaatgatgatgaacatgagaaatgatctgttcagtcacatggagaaacttccgattaaatatttcgatacacatgcgcatggtgatattatgtcaatctacacgaatgacattgatacactcagacagatggtaagccagagtattccgcagattatcaacagtggatttacaattgtcagtgtatttatcagtatgctgatcttgaatattccactgacagcagtgacgatggttatggttgcgatcatgatctggggaacaaagaaagctgccggacagagtggaaaatatttccttgagcagcagaagaatcttggtaaggtcaacggatatattgaagaaatgatgaacggccagaaggttgtgaaggtattctgtcatgaagaagaaagtaagacagaattcaaaaagttgaatgaggatctgtttgtaagcgcagaccgtgcaaatacttatgcaaacttcctcggtcctatgaatgcgcagattggaaatatcagttatgtaatgtgtgcaatcgttggaggtgcacttgctcttaaccatgtcggtggatttacattgggcggtctggcaagttttcttacatttaataaaagcttcagtatgccgatcaaccaggtgagccagcagctgaatgcgattgttatggcactcgcaggtgcggagcgtatctttacacttctggatgaaaaaatggaagtggatgaaggttatgttacattagttaatgcgaaagaagagaatggaaaactgacagaaagtgagaaacgtactggccgctgggcatggaaacatacacatcaggcagatggttctgttgattatgttgagttaaaaggaaatgttgtatttgacggagtggatttcggatacaatgatgacaaaatcgtccttcatgatgtgaagctatatgcagaaccggggcagaagattgctttcgtaggttcaacaggagccggtaagacgacaattacaaatctgatcaatcgtttctacgatattcaggatggtaagatccgctatgacggaattaatattaacaagatcaagaaagcagatcttcgacattctcttggaatcgtattgcaggatacacatttgtttactggtacagtgaaagataatattcgttttggaaagctggatgcaacagatgaagaaatcattgcagcggcaaagctggcaaatgcagatggatttatccgcagacttccggaaggatatgacacggtgatcaccggagatggagcaaacttaagtcagggacagcgacagcttcttgcgattgcccgtgcggcagtagcagatccaccggtattgattctggatgaggcaacaagttcaatcgatactcgcacagagcgtattatccaggaaagtatggaccggctgatgcatgggcgtactacctttgtgatcgcacaccgtttgtcaacagttcgtaattctgactgtatcatggtacttgaacagggaaggattatcgagagaggtacacacgaccagttgattgaagagaaaggtaagtattatcagctgtatacaggaaatgcaatatcagcgtagaagaaagtagagataaaaaagaactgaacccagataattaatgtcaatgggttcagttctttttgaaatagaaatcaacgttcagtaaaatctaaagcttcatgtgcaagtttacgttcagcttctccagcagaacggtatttcaaaagtaaattcacttcattttttgtaagaagaatgtcgttttcactattttcaattttaatacagaaatagttttttacttcaactgatgatggattctttgcattgcagtactgagtgataagcgagtcgacagaggtgtgatagatccaggatagttcagcaagaagttgaaggtttggttcacgtacaccggtttcataatttgaataagcctgatgagtgatatgcagctttttgccgatctgagcctgtgtgtagttatattgctttctcaaacgccgtagattatccgcaagttgaatatttgccatagtttcacctccgtttctatcatccgttaaggttcaaggatgtcttttccctcaatgagatattcataagaaacgtcgaagatctcagttagagctttcaattctatgtctgtaacgtaacgtttgttggtttctattcgtgtaattacatttttgtccatatcatatccgcgcaattggagtttgtaagctaaaagtctctgtgacatatggtgttgccgacgaagttcaatgagccttttgccgatcagattcttttctccggtagtaggtgttcgttttggcatagttctaatccctcctgcaaatagtgtgaacaggtttgtctcgttttttgcacttttaatgattttacatggaattgagtaaccaaatggttggaataatgagacaaatggaaaataattgtatgatttgtaatgattgatctccgaagatagtgtataatgtattctaaagatattttagagaactaggagaaaatacaccatgtatgaaataatgactgccgatgaagcaatccggctgattcgggacggagactgtatctgtgtgaattcatttgtcggaatagagaatccaatagaacttcacgaagcaatttacagaagataccagaagatgcagtccccaacacatctgacaatgatttctagtgccggttttggtgtctgggatgatgaacataatgcagaaggatacatcagagagggcgctgtggacaagcttatctgcgggcattttggagcaatgctcagtacaaagaaactggttttagaagaccggtttgaggcatacaatcttccgcttggatgcatttcacatgcaatccgtgcacaggccggaggtctcccgggtgcactttcaaaggttggcttggatatatttgtagatccaagaaaagaagggcccggaattaacagaatttcaattgatgattcactggtcaggcatgtggaagtggatggagaggaatttctctattataaattaccgaaaattaatattgcactgattaaaggaacagcagcagaccgaaagggaaatattacttttgacgatatgtttatgtccggtgatgcgctgtctatttgccaggcagtaaaagcgaatcgcggcaaggtgatcgtacaggtagaccgcctggtggacaccccgtcacgaccgagaaatgcaattattccgggatgtctggtagatgcgatcgttgtggcagaaccggaagcaagaaatgaagcctatacagcactgactggaagctttgagattccatatgaagagtggaacacatggagtgagcgtttagattctgtctcagtgaaacagtcaaagaacagtacggtggcaaatatcatcggaaaacgtgcatcgaaggaattacgtgtagatgatattgtaaatattggaatcggcattccggagatggtttctcgttttgcaagaaagagtggaatgcttgatatggtgacattgacggttgagtccggaggaatcggaggatttccggtttcaggagaagcatttggagcaatgatcggtgcggcatctgtttatgatatggcaaaccagtttgacctttatgataatggtggcctcgatgtctgctttatgggcgcgcttgaagtggataaagaaggaaatgtgaatgcacaccgtggaccgggagcgtttgccggaatcggaggatttgcgaatatcacagctaagacaccaaccgttgtattctgtttcagttttacagcaaaaggactggaagtttcacagaagaaggggattgttgaaattgagaaggaaggttctatttcaaaatttgtagatcgagtcaagagtattagtttttctgccagacgtgcgatcgcaaatggacagaaggtactttatgtgactgaacgctgtgtatttcgcctgacaccgaagggactgaaattgatagaagtatatcctggaatcgatgtgcagaaagatattttagatcttctgccattcgaagtggaagtatgatatagaaaatcaatgcaaaataagatgaagatttgttaaaatagttcatggacttcatcacgttaaattgatacaatttatccacaggacaacagaaaggacattattattatggaaaaaggtacaatttttaaatttcataatgatcttgatacagatcagatcatcgcatcccagtatctgcttctgccgaacttagatgagatgaagagccatacatttgaatcattggatccggattttgcgaaaaaagtaaaatcgggagatttcgtagtcggaggagagaattttggttgtggatcctccagagagcaggcaccgggtgtgctcaaagcacttggagtacaggctgtcattgcgaaatcatttgcaagaatcttctatagaaatgcaatcaatatcggacttccggtcattgtctgtaaggagcttccggatgaggtgaagacaggtgatacaatggaacttcgcatgtctgacggaacagctgaggcgaatggaaagacttattcctgtacaaagctgccggagtatatgcagaacattctgaatcagggcggactgatcgcttcactgaataaggaggactagaactatgggaatgacaatcgcagagaagatcatcgctgctgcagccggtgtggacagcgtaaaaccgggagatatccatacagtaacattggacagaatgatgagtaatgatggaacgacacatcttactgtggatatgtataataacaaattaaagaatcctcgtattgcagatccgaagaaactggtatttattgtggatcataatgtgccgtcagacagtccgaagacagcggcatctcagaagaaaatgagagattttgcaaaagagaacggaattgacttctgggaaggaaagggtgtctgccatcaggttatgatggagaactatgtccgtccaggagaactgatcttcggagctgacagccatacttgttcttacggagcactcggagcgttcggtacaggtgtcggatgtacagacttcctttatggaatggtgacaggacagtcctgggtactcgttccagaatcagtgaaattcaatctgattggagaacttccggaaggcgtttatgcaagagatctgatcctgacaattatcggtcaggttggtgcgaacggatgtaactatcaggtgatggagttcacaggagaaggagcaaagacactgagcatcagtgatcgtatcgcactttgcaacatggcagtagaagccggagccaagacaggtatctttgaggcagatgaaaaagcaatggaatacctgaaagagcatggccgtgagccgaaagctgtattccacagtgatccggatgcgcattatatcagagagtatacaatcgatctttctaaagtggaaccggtcgtggcaaaacctgattttgtagataatttaagtccggcaaaggaagtgcgtggaattaagattgatgaagcatttttaggttcctgtaataatggacgtattgaagatcttcgtgtcggagcagaagtcatcaaaggaaagaaagttgcagataaggttcgtttccttgttgttccggcaagccagacaatttaccgccaggctcttaaggaaggacttcttgacattttcatggaggcaggcgcaattgtgatgaatccgaactgtagtgtctgctggggaagctgccagggagttatcggtgaaaatgaagttctgatcagtacaggaacacgtaattttaagggtcgtgcaggacacccaagttcaaaagtgtatcttggatccgcagcaacagttacagcatcagcaattaagggcgagatcacacttgcatctgatctgtaaagtgaaagaaacaagaggtagcttacacagagaagaacttatatattttgaggtgaactatggataaatttacaggaaaggtgtgggtgctcggagatgatattgatactgatatcatcatcccgacagagtatcttgcactgaaaacaattgacgatatgaaacagtatggattcagtccgcttcgtccggagctggcaggacagatccagaaaggtgatattattgttgcaggaaagaactttgggtgtggatcttccagagagcaggcaccggagatcatcaaagcacttggaatccagtgtgtgatcgcaaaatcatttgcaagaatctttttccgcaattcaatcaacaatggtctgcttttgatcgagcagccggatctgtatgatgatatgaaagaaggcgacacaattgatgtcgtgatgaatcagcatgtagattataatggcaaagaatatccgatcgcttctctgccggagaatctgatgagcatcattcaggcaggcggacttgtaaaagctatgcgcaagctgaatggacttgaggattgagcagaaaggagagcatgatgggcgagacgattattgaaaagattatcagacataatacaggaaaggcagtaaagccgggagatatcgtgacagtcaatgtggacagatgcatgatccatgatattttcattccttttgtagcagataaatttgaagagatgggatttacaaaacttcatgatccggataaagtggttttgatttatgaccacctggttccggcaagccagcaggatgacacaagacatttccacaaaggagatgaatttgtagaaaaatatggactgactcacgtacatagaagcgacggaatctgtcaccagctgatgacagaagccggatatgtgaaacctggagatatcgcattcggaacagacagccatacgacaacttatggttgtgtcggcgcattttcatccggaatcggttatacagaaatggcaagtattctcgggaccggtacaatgtggatcaaagttccggagacaatcaaagttgtgattgatggagaacttccggaaaatgtaatgtccaaggatatcattcttcgactgatcggagatctccgtgcggacggagcaacttacagagcactggaattctcgggaagcacgattgagaatatgtcagttgcaagccgtatgacaatggcaaacatggcaatcgaggcaggagcaaaatgtgctcttttcacaccggatgagaagacggcagaatattgtgagattgaactcaacgactaccagaaaagccttgttggagatgaagatgctgtctatatgaagacaatgacatataaggcagaggatttcgttccggttatggcatgtccgtcccaggttgataagatcagaaatgtcagtgaactggaaggaacagagattgaccaggtatttatcggatcctgtacaaacggacgtctggaagatcttagagctgcggcagaagtactcaaagggaagaaagttgcagactttgtgaagctgatcgttacaccggcaagccgcaagatctacagacaggcactggcagacggaacgctggatattttggcagaagcaggtgcgatcattacacatccggggtgcggactgtgctgcggaagaacaggaggaatcctttctgacggagaacgagttgtagcaacgaataacagaaacttccttggacgtatgggaacatctaaggtagagatttatcttgcaagtccgagaacagcagcggcatgtgcagttgccgggaagattgtggatccggaataagataatatagaaatattaaaagctatcgattacaacaattaagatgaaatgtgttgtaaccgatagcttttttcgtaaatgttgcaactgtttttctaattgacaccttctaatgattttgttatagttaattcacatcaaaatctcagacatatattttctatatttcatttgtctgaatgtgttatcgaaaggataactttatctcatattcaaggctgtatcagcaggagattccattttgatgagttacaaaataacaaaagaataagaaaccaggagagtatttgtcccgatttcgaaaaaaagatcgattgataccgattatttcattagtcttttactatggttcagagccgtgggatggacctgttgatctgtatgatatgtttcagttggagggtacgaaagaagagaacgaaattttggagaaatatcttccgaactataaaatcaatcttgttgatgcagaacgattggaagatgttgaaaaattttcgaatgatttacaagtgatactaactatgctaagatatagggacagtaaggaagaattaacggattacattaacgagaataaaaagttttttcagaacgttgattatgaaacaagccaggcgatgaaagcttttctaaacatgaaacaaataccaggtgaagcagaacataaggaggagatgattgatatgtgtaaggcaatacaggaaatgtatgatgatggagtgaaagatggaattcagaaaggtgtagaacgtggaatagcagcagttattagaacgtgtcggaatttaaatgtttcagaggaggatactcttaataatgttcagagagaatatgagctttcaatggaagaagcaaagaaatatctggagacatattggaaataactagaggtaagaaaaataaaaagctattgattacaacaattatagatagatgtgaattattaaagtgctctggttgcagaaatgtagccggagatttttgtaacctttttaataaaatttccgtctaataaatgtaaacataacaaaggacgggttgacgtgaaattatatatgttgttgtttacgaaaggaggaagaggaagagtggacaaaaaagaggaaatccgaattgtcaaaaaggcaattaagggaaaaccagatgcatacggacaattgatttcggactttggctcgttgcttgcgtaaatacaaaagggaaagcgattctttaaccgctttcccttaattataactgcttggaattaatctccccaaatgctatatgtatttcggatacttacagaatatcaatatactccccggccagtgctttattcatgcttcttactgcacagaattttccacacatactacaagtatcgctgtggtcgtcctccggttttctgctgtcgcggattgcttttgcagtttcaggatccagagcgcattcaaactgtgcatcccagtcaagaacacggcgggcatctgccatcttatcatcgatatctcttgctccaggaattcctttggcaatatcagcagcatgagctgcaatcttagaagcaatgattccctgttttgtatcttcaacatttggaagagcaaggtgttcagctggtgttacatagcagaggaaggaagcaccgttcattgctgcaacagctccaccgatcgcggaagtgatatggtcatatccaggagcaatatctgtaacgataggtccaagtacatagaaaggagctcccatacagatggtctgctgcactttcatgttagctgcaacctgatcaagcggtacatgtccaggtccttctaccataacctgaacattatgatcccaggcacgttttgttagctcaccgagacgcacaagctcttcaatctggcatacgtctgtagcgtcagccagacatccaggacggcacgcatcaccaagtgagattgtcacgtcatattcttcgcagatatcaagaatctcatcatagtactcgtagaatgggttctcttctcctgtcatgctcatccatgcgaatacaagacttcctccacggcttacgatgttcattttacgtttatgctttttgatctgttcaattgtttttcttgtgattccgcagtgaagtgtaacgaagtcaacaccgtcttctgcatgcatacggatgacatcaaggaaatcctgtgcagtcagagtagcaagatctctctgataatgaatgacactgtcgtatacaggaactgtaccgatcatagcaggacattcagaagtcagtttgcgacggaacggctgtgtatctccatggctggaaagatccatgatagattcggctccaagttctactgcgctcattactttctgcatttcaatatcataatccttgcagtcacgggaaactccaaggttgacattgatctttgtgcggagcatgcttccgacaccttccgggttcagggctttatgattcttgttagcacagattgcaacctttccttctgcgacaagcttcatcagtttgtcagtgtccatatgctctttttcagctactgttttgatttctggggtgagaatccctttacgagctgcatctatctgggttgtgtagtttctcatgttgttttgcctccattcgtatacgtgaattatataatttttgacgtcagcaaaacacggacagcgtacacaagaaaagctacggttccatgcatatgaatagatgcggaaaggaacgtaactgtttagctacactaccagcgaatgagtataagattatgctgacgccttcaacggagatgtattaatgactgtaaaataagaaagttattaatggaatactccggtgattacagattgattctgcattttcttgtgcggtacaaggtggtgcccccaatgtatcgcatgtaactgttcggaaattttgcagttacggattaagaagtcggaaaaagctgtgccattactccacttttctggaatactgaaatcagcaggaatgccaagatacttccggctactgttgagatcaggaatgggatcacatagataaataatcctgccggtgctgctcccataaggaataaagcaaccggataagcagcaattcctccgagaatacctgttccaagtgcttctgcaagacaagtaaggcttaaattcttacattttttgtaaacaagtccacagcagagagctccgatcatactacccgggaaagccatcagacttccgattccaagtatattgcgcagaaggcttgcacagaatgcaattccaacgccccagccgggaccaagaagtacggctgcaaagatatttaccatatgttgaaccggtgcacatttacttccggctacaggaaagcttaaaaagcttccaacgatggcaagagcggtgagaacacctgcaagtgccagtttttttgtgtttgttgtctgtttcataacttgagtctccttttaaatgtaaaaaaggatcctcacctgagtgaagatcctaccagctgtccgaagtaaaaagagatgcaagggcatctcaatcattacatggtatcaattccctccgttggcattatccaaatcaggtttaaacgggtcgaaacggtaacacgtctcctctcagccggttctgaccagctcccctttgacaatatttagttctttgtctgatgctattatgaaccgaaaaagtgaaaaatgcaagaggaaaatttgaagcaaaaggagaaaaaatttaaatcaggtttaaaattataagaagctgtattgaaaaataaatagaaaaacaatacaacttcttatttttatatattattacataaaaaacagaagaaaaagattgggtatactgcgaattgtattgtgacatgtattgttgtatattaagtacatgaagaaaaagtactgatcagagcaatgataatcagaacactgtaagtgataacggtaattatggttaattgtatggagaggtcacgggcgaatgaaaaaatttgaaaaaattgtaacctggattcaggaggaagtcaggtcgggaagaatggtttccggagagaagcttccttcagaacaggaactatctgaacaattccaggtcagtcgtcagacggtacgacgggcattggaagaattagtaaaagagaatattgtggaaagcagacgcggaagtggctcttatatatgtgaagatgcgggaatccttcttggaaatacagaaagaagagcagatcatgaagaaaaacgaatcgcagtaatgctgacgtatatcgatacctatatttttcctgttattatccgggaaattgaaaaaaaggtaacacaggcaggcggaatacttcaaattgcaatgacagacaattctgtagcaaaggagcggatgcatctggaagaatttttgagaacaagaagaattgatggtttgattgcagagcctgtaaaaagtgggcttccgaatccgaatttagatttatatcagaaattacagaaatcaggaataccggttgtgtttgtgaatagtttctatgagaatctcacaattccacatgtcagtctagatgatgagaaagctggatatcttgcaacaaaacatcttttagaatgtggacatacaagaatcgccggaatcttcaaggcggatgacgggcagggaagaatgcgatatgcaggatacacaaaggcactcatggagcattcacttaagattaaaaatcgtcagattttatgggttgattcggaagatatccgggaaatggagatggaaagtgacagagtcctgaaacgtttagatggatgtacggcctgtgtctgttacaatgatgagattgcaagtaaactggtcaaggtactgcaaagtgcggaagtcaaagtcccagatcagatttccgttattggaattgacaattccagtcttgcaagattttgtgaagtaccgatcacatcggtgaataatccggcgaatgagattggaaagtgtgcagcacagattatattggataagattgataaaaatatggaaatgtactcagcggaatttgcgccggaacttgtgatgcgaaattctgtgaaattatataatgaagtcatgtagacagcagacgaaaggagaagaataatgttagaacagttgaaaaaagaggtttacgaggcaaatatgctgcttccaaaatatgatctggttacatttacatggggaaatgtaagtggaatcgatcgagaaagcggactttttgttattaaaccaagtggagttgaatatgataagctgactccggaagatatggtagttgttgatctgaatggaaataaagtagagggacgttacaacccatcttccgatacaccgacacatgttgttctttataatcgttttccaaaaatcggtggtgttgtacatacacattctgcatgggcaacaagctgggcacaggcaggaagagatattccatgttatggaacaacacatgcagattacatttatggagaaatcccatgtgtacgtaatctgacgaaagaagagatcgaggaagcatatgagaagaacacaggagttctgattgcagatgagtttgaagctaagaagaaagattatattgcagttccagcagttctttgtaagaatcatggtgtatttacatgggggaaagatgcacacgaagcagttcacaatgcagttgttgcagaagaagtggcgaagatggcagcaagatgtgagatgatcaatccgcaggtaaaaccggctccgcaggaacttcaggataagcattactatagaaaacatggtgcgaatgcctattacggacagaatacagcaaaataataactgtcaagtataacacagtaacaaattaagtgataaataaaaaataactatgaacattttattacaaggaggacacaaaaatgctaaagaagaaagagtacaaattctggttttgcacaggttcacaggatctttacggagatgaatgtctggcgcatgtagcagagcatgccaagattatcgtagagaagctcaatgagtctggagttcttccatatgaagttgtatggaaaccaacattgatcacaaacgaactgatccgtaagacttttaatgaagctaatattgatgatgaatgtgccggtgtcattacatggatgcatacattctcacctgcaaaatcatggattcttggacttcaggagttcagaaaaccactgcttcaccttcatacacagttcaatatggagatcccatatgacacgatcgatatggatttcatgaatgagaaccagtcagcgcatggtggacgtgagttcggacacattttcacaagacttggaatcgagagaaaagttgttgttggacactggtcagacgagaaggttcaggagaagatcgcttcctggatgcgtacagcagttggtgtgatcgaaagcagccatgtacgtgtcatgagagttgcagacaacatgagaaatgttgctgttactgaaggtgacaaagtagaggcacagattaaattcggatgggaagtagatgcttatccggtaaatgagatcgcagagtctgtagatgctgtaagcgcagcagatgtaaatacattagtagaagagtattatgacaaatatgagatccttcttgaaggaagagatccggaagagttcagaaaacatgttgctgttcaggcacagattgagcttggattcgagcgtttccttgaggagaaaaactatcaggcaatcgttacacattttggagatctcggtgcactcaaacagcttccgggacttgcaatccagcgtctgatgcagaagggatatggatttggagctgaaggagactggaagacagcagctatggttcgtatcatgaagatcatgacagaaggcatgaaagatgcaaaaggaacatcgatgctggaagattatacatataattttgtgcctggaaaagaaggaatccttcaggctcatatgcttgagatctgcccatctatcgcagatggtccgatcagcatcaaggtaaatccactttctatgggagacagagaagatcctgcaagacttgtatttacatcaaaagaaggaaaaggtatcgcaacatcactgatcgatcttggagaccgtttccgtctgatcatcaatacagttgattgtaagaaaaatgaaaaaccaatgccgaaacttccggtagcaacaaacttctggacaccggagccggatctcgcaacaggagctgaagcctggattctttgcggtggtgcacatcatacagcattctcttatgatatcactgcagaacagatgggtgactgggcagcaatgatgggaatcgaagctgtatatattgataaagatacaacaatccgtaatctgaaaaatgaactcaaatggaatgaacttgcatttagaaaataaaaaatcattaagaggataaccttcaatacttaaaaatttatcgaaaattcattgaaatgaagaaaacgaaaaggtataatatctaattagaaaaaaagtctccgtaaatctgtccgctaagaaaatgcaaagcagacagatctgcggagcaaaaaggagtttaagtatgagtattaaaattggtattttaggttatggtaatcttggaagaggcgttgagtgcgcagtaaagcagaatgatgacatggagcttgtggcagtgttcacaagaagaaatccggaagatgtcaagattctgacagagactgcgacagtttgtaatgtagcagacgtagaagactggaaagataagattgacgttatgataatttgcggaggaagtgcaacagaccttccaaaacagacacctgtttacgcaaagatgttcaatgtaatcgatagttttgatacacatgcaagaatcccggagcattttgcaaatgtagatgcagccgcaaaagaaggcggacatgtaggaatcatctccgtgggctgggatccgggaatgttctccctgaatagactgtatgcgaatgcgattcttccggatggaaatgattacacattctggggcaaaggtgtaagccagggacattctgatgcaatccgcagagttgaaggtgtcaaagacggaaagcagtacacaattccggtagaggctgcactgaaagcagtaagaaacggagagaatccggaacttacaacaagacagaaacatacaagagagtgtttcgttgtactggaagaaggagcagatgcggcgaaggtagaagaagagatcaagacaatgccgaactacttctcagattatgatacaacagtacactttatcagtgaagaagaactgaaagcaaaccacagcggaattccgcacggtggatttgtactccgcagcggaaagacaggatgggatggtgagaataagcacctgatcgaatatagtctgaaactggattccaatccggaatttacatcatctgtactgatcgcttatgcaagagcagcttacagactggcaagcgaaggacagagcggatgcaagacagtatttgatattgcacctgcatacttaagcgcaaagagcggagaagagcttagaaaacatatgttataaaatcggatgcggcgatgacttacttaaatgagttatacgtcgcattttttataggagggcaaaaatatgagaggaaaagaagagattaagaaaacaatcgaagaaggaaaagcggtgcttggaattgagtttggttctacaagaatcaaagcagttttaattgatgaggataaaagtccgatcgcatccggaagttatgactgggagaatcagcttgtagacaacatctggacatacagcatggagaaaatcaagaatggtcttcagggatgttaccaggatcttgtgaaagatgtagaagcaaaatataatgtgaagcttacgaaatttgcagcactcggagtcagcgcaatgatgcatggatatcttgcgtttgatgagaatgatgaattgcttgttccgttccgtacctggagaaatacgatcacagaagaagcttctgaaaaactgacagagctcttttcttatcatattccgcagcgttggagtattgctcatctgtaccaggcaatcttaaatggtgaagaacatgtaaaagatgttcgttatattacaacacttgcaggatatatccattggaaactgaccggcaagaaggtgctcggaaatggtgatgcagcaggaatgttcccaatcgacatagctactaagaaatttaatgagaagatgatggatcagtttgatgaacttacagcagagaagaatttcccatggaagatccgtgaaatccttccggaagttcttgttgccggagaagacgcaggtgtattgacagaagaaggcacaaaactgcttgatcctacaggaacacttcagtccggaattccaatgtgtcctccggaaggagatgccggaacaggaatggttgcaacaaacagcgttgctgtccgtacaggaaatgtatctgccggaacaagtgtatttgcaatggcagtacttgagaaagacttgacaaagccttacgaagaaattgacctcgtaacaactccggccggagatcttgtagcgatggtacactgtaataactgtacatcagatctgaatgcatgggtgaatctgttccgtgaatttgcagagagtatgggaatgacagcagatatgaaccagatttttggaacactttataacaaagcattagaaggagattccgattgtggcggacttctggcttacaactatttctcaggagagcatattacaggatttaacgaaggaagaccgttattcgttcgcaaacctgacagcaaatttaatcttgcaaactttatgagagtgcatctttatacttctcttggagcattgaagacaggaatgaatatccttctgaaaaaagaacatgttgcattggatcgaatgatgggacatggcggattgtttaagacaaaaggtgttggacagagaatccttgcaggagcaatcgatacaccggtttatgttatggagacagcaggtgaaggtggtgcatggggaatcgcactgcttgccgattaccttattaagaaagaggacaaggaatcgctgacagattatcttgagaacaaagtattccatgatgcagtgggaacaggaatggatccggttgcggaagatgtggaaggatacgagaaatttatggaaacatatgctaagggtcttgcaatcgagaaagcagcggttgaaaatttatagttacgtgtgttgctggacagtagtagatgaagtggaaatgatattttcaaggggctgtacatggtatcccatctcttcccatctggtcagtagttcatccaggatttcagcattagtggaagatgtgctgtggagcagaacgatagctccgggatgaatccttccgaggagtttggagaaagcttcttctttggatggctggttatcctgataccagtctacataggcgagactccagaagaaacttttgtaaccaagttcttttgccatttgaagattagcttcactgtattttccctgaggaggccgatagtatttggtcatattctttccggttacgtttttataggcagtttctacatattccagttctttttggaaatcttctatagaagaaatatgggacatgtcggggtgatgccaggtatggtttcccacggtgtgtccttcttttattatctgtcggatcagttcaggctcagagtcaatgtaggttccgacaacaaaaaaagtggcttttacctgatgttttttcagtgcatcaaggatggcaggtgtatttccgttttcgtaaccggcatcaaaagtaagatacagaactttttcagacgtatcctgtgcgtaataagcatccatagatgcaagttcctggatcgaagcatttccaacaggagttttgccttcttcctgaaaacttaacccccagtttccttctgaagaaagtgtgagatcaggaagggcacaggaaatcgtccggggaatagaagtcacggagttctggttgactggagaggggcgagccgaagttgactcattagaaaaagcgaaaatctgttctttaagaaatccagctccaatacctgaaaaataagagaaaacaagaaataaaatgcaatatttctttgatttaaaagggtgtatgggaaaatggatacatttccgggaaagagagagtttcattcgttcacctcggaaaatcgttaatagaatatatgaaattgtatttctttttatacttgttgatcaggcagaggaatgatatactaatccggtaattgtattgtatcccgcaagttgggaatgataacaaggaggaattgaataatgaaaacaaagaaacatgacactcgttggatggttagtgttgcacttatggcagcaatcgtgatcgtactggccaatacaccgcttggtatgatccagctccctatcattaaggcaacaacagttcatattccggtgatcctcggagcaattctgttaggacctggtgcaggagcaattcttggagcagtttttggtatatgctctctggtcagtaatacaatggctccgacactcttatcctttgcattttcaccatttttaagtacaacaggaattcctggagcgttgaaggcaatctggatttccgttggatgcagaattctgatcggtgtggcagcaggatggctgtgggtactttttacaaagattaaactgaatcagtttattgcacttccgattgtgggatttgttggttcaatggtgaatactgtcactgtaatgggaagcatctatttcctgtttgcacagcagtatgccgaggcaaaagaagttgcacttacagcagtattcggtctggtgatgggaactgtgacagcatccggtattccggaagcaatcgcggcggcaattctcgttctggcacttggaaaagtacttgttgtagttttccgcaaaatgaaccttggggctgtgaatgtggagtctgcaaaataacagacagattttaaaatagaagaaagtaatgaatcatgaagaagttaaatgaatgtggaattaagactgttatcagcttataaagttacaaaatagtaacaaaaccacaagaaagcaacttcttcatgttgttttttgatgaattttaattgttgttgtagttgattaagtgccaggtgtgtattataataaagctatatgatatgcaaaaactgttggaagatcagaacagcagaaagaagaggagaaagatatggcagaggattacagaaaccaggcaatcggcgtatttgaactggaaagtgagtgtatctgttttgtagcacttgatgcggcagcaaaagcagcagcagtaaagattcagggtgtggagagaaatcgtcttgcggcaggagcctgtgtgaagatgagaggaagtgtctctgacgtgaaggctgcaatggaagcagcactggatgtagccagaccgttgacgaagattgtttcccatacggtgattgcatcaccttctgaggatacggaaaaagcaattgcaatgacaattaataaataggtatttgttcaattgtctgttgtacatatgagaagagtattgttttgtgaggaaatcagagaaggaaaagaaagggaaataagatgaagaaatatggagcatatggcctggtagaggtaaaaggagaatccaatgcggtgatcgtagttgaccgcatgttaaagactgcagaagtagagtatgtgacacaggacacaaagtgtggtggacatgcacttgtttttgtaggtggcagtgtatcagcagtaacagcagcggttgatgaagtgaaaaataatgcaccgtgtaaagttatacaaactgctgtaatctccaatccgtctcaggagatggttgacatagtagaaatgtttaagaatagataagagttaggattaagtaaaatggaaagagcaatcttgttttttgatattgatggaacagtgttgagtgaagtgacaaaagaggtaccgcaaagtgcgattgaggcaatggaaaaagcacgagcggaaggacatctgctgtttattaatacaggcagaacaatctgtagtattccgacagaggtgagaaaattccaatttgatgggtatttatgtggctgtgggacatatcttacagaacatgatgaagttttgctaaaaagctcgattgagaagcagagaggtatagaactgctgcgaaaagcaaaagaatgtaatcttggtgttattgcggaaggacaagaggattgttattttccagggcacatatcacgatttgacaggttagaatctacaagaagatattttgcatctagaggaataggaatcgaacagtctttagagagcgaaagatttgaatatgataagttatttgtttacgtagatgataagagcgattttgattcttttcgtgagtatcttggagatgacatggaagcacttgaccgtggcggaaaggcctatgaggtaattcagaagggattttctaaagcgacagcatgtcagtttattatggaaaaatatgacatggatgcaagtcatgcgtatgtcttcggagacagcagtaatgatctggcgatgtttgaatatgcggagcatgcgattgcgatgggcagacatgattcggtattggatccatatgccgagtttgttacaaagacagtggaaaatgatggaattgcatatgccatgaagcattatggattaatttaacagaaaatagaaaacaggatctgtcagtaaagataaaactggcggatcctgttttttatatattaggaaagtcctttcctaatatataaaaaacgctccgctcaggatgcgcactgcggcgtacaaggtaggtgtcgcaagcgaccgccgcaggcgcaagaatgtgccaaggcacattctttgttcataaagtatttctgttatacaataccggcaccgtcaaagaagctgacatctgttggatatacatagctgtctccaatgtcatgaagaagtacaacattcaagtgattattcaggttctttttatccaaagaaattgcatcagtcagtacatcaatcggtaaattagagttgtccggaagtttataaatctccaatgcctttttgatctgttctgcgcatccggatgtggttaatcctttctcttctgcaatctttgtgatctgatacataccgattccaacagcctctccatggctttcgcgctcataattgaagtgctgttcaatcgtgtgcgcaagtgtgtgtccaaagttcagaaggatacgttctccaaggtcaaactgatcggcttcgacaacgattcttttgatatcaacgcagcgtgcaataatctgtgtcagcttcgactttaaatcatcgaaggaagtatgtctacataaaagctcaaaaagctctttgtctttgatgcatccatatttgatcacttcgcccattccatcactgatgaaatgatctggcaatgtatttagcacatctgggtcaatgatgactgcctttgggtgataaaatgcaccaacaagattttttccctgtggaagatctaccgcaacttttccaccaacagaggaatcaacctgtgcgaggagtgaggttggaatctgtacaaatttgattccacgcagataactgctggcagcaaatccggcaagatcaccgatcacaccgccaccaagtgcgatgagcaggtcacttcgtgttagttttgcatttattaatgcttcatagatcttaggcagagactggaaactcttagtaggttcgccgtgaggcagaacaaaagagtggcattcaaatcctgagtcagacaatgcttttgtgataatttttccatagagaggaaaaacattatcatctgaaacgatcatgattttttttccggagaacacttcgcttacaagttctccggtttttgcaaggattccattttcaatatggatcggataagaattcgatccaagatcaactgttaatttcatgacgatctccttagaattttttaccgactacttcggcaatttgacgaacttgctgaagcagaacatcatatttctcaggtttcaaagattgtgctccgtcacaaagggcagcttccggattgttgtgaacttcaatcataagtccgtcagcacctgcagcaactgcagcctttgccataggctcaacaagccaccattttccgccggcatgacttgggtcaataataattggaagatgtgtcttgctgcgaagaacagggatacactgaagatccagagtgtttcttgtaaaagtctcaaaagtacggataccacgttcacagagaatgacattttcattaccggatgccatgatatactcagcggacatgatccattcttcgtatgtggcattcagtcctctctttaacaggattgggcgatcaacctgtcctaattctttgagaagatcaaagttctgcatgttgcgggcaccaatctggatcaggtcaaccttctcgttgaatacatccagatacttggaagacatgagttctgtgacaataggaagtccgacttcttctctgactgcacagagaatatcaagtccctcaagtccgagtccctggaaagcgtaaggacttgttcttggcttgaatgcgccgccgcggagaagatttgctccggatgtttttgctttttgagcaatctcaagaacctgctcataggattctacagaacaaggtcctgcaatcagtcctaaatgttcaccgccgatcttaacaccggaaacatctataatagagtcttccggatgaaatgcgcgatttgcaagcttataaggctcctgtacatgcataactttgtcaacacatgtgtcaatttcaaattgtcttggatcgatcagtgttgtatctccgatacatccgatgatcgtcattccggttccctgaaccagatgagtgtcaagtccgtgcttttttacaagattttcgacacgatgtatattttcctcagaagtatgaggtttcaaaacaataatcattttttatcatcctccttaatattcgtactgtaaaattttagttgtttaaagtgcgaaaacatatgtatcataaaacatatacaattagatgtcaatgtcttttggattatttgaagaaatatatcaaaaaaacatgcaaaatagtgtgattatttcatgaataatcacattgacggatagaatgcgcagtgctaatctaaaaagcgtgtcatgtgaagagagagttctcctggcatgagattgacagaaactgacgaaagaatcgtttctggaacttgacatgtaggcttacatattaaaaagaggtaaaacaaatgaagattttaaaacagtttggtgtgatattcggtgtttgctggatcagtcttgtaatcgaacattatctgccgttttcttttccggcgagtgtaatcggtatgattttattgttgatctgtctgctgaccgggttcttaaagattgagcatgtgcaggaaaaagcagatttcttattaggaaatatggcattcttttttgtaccggcaggagtaagtatcattaattattttgacattttaaaaagtacagtacttcagcttcttgtaatctgtgttgtatccacgattgtaacatttgctgtgacagcgtatgtagttacgctgacagtgaaattgatggagaagaaaaagggaggaaagaaagcatgaaagaattaatggcatctccttattttggagtagggttgagtgtggtagcattctggataggagaaaagctgcatagtaaattaaagacaccgatctgtaatccgctgatcgttgcgattgtattgattgtaggagtccttttgatttttgatattccatatgatagctatgatgtgggcggggctttgatcaatatgtttcttgctccggcaacagcatgtcttgcggttgcaatttatacaaaaattgatgttttgaagaaatattggcttccaattgtagttggatgtactgcagggtcagcagcatctatggcaagcgtgtttggaatgtgcaaattatttggactggatcagagcatgacagtttcactgatccctaagtcagtgacaacacctatcgcagtgagtatttctgagccggcaggtggtgtagtgccgattacggtggttgctgttattttcacggggatccttggaagtattctggctccgacgctgatcaaaatattccatgtgaaggattctgtggcagcaggacttgcgatcggtgcatgtagtcatgcagtcggaacatcaaaggcaattgaaattggtgagatcgagggtgcaatgagcggtcttgcaatcggaatctgtggaattattacagtgctgttttcaatgcttattatgtaggcgaatttaataatcatgaaaagaatcgatttcatcaggatttttcgtatagaaacattgcctgaaagaaatcggttctttttttgaaaaaaataaggatttcacgcttcggtcatgacaaatgtggaaacttatgttatactctaagttaggttagtgccattatactttgaattatggtttgtgtgaaaaagacagaacaggcactgaaagatagaatttaaaggagctatacggtatgaaaagagtattgttaaagctgagcggagaagctcttgcaggcgagaagaagactggatttgatgaggcaacttgtatcggagttgcgaagcaggtaaaacagcttgtagatgaaggtgtgcaggtagcaatcgtaacaggaggaggaaacttctggagaggaagaacaagtgagacaattgaccgtacaaaagcagatcagatcggtatgcttgcaacagttatgaactgtatctatgtgtcagatattttccgtcatgtaggaatgaagacagaagtattcacaccttttgtatgcggagcatttacatctctgttctcaaaggatgcagcagttgcagcactggaagaaggcaaggtgatctttttcgcaggtggaacaggacatccatatttctcaacagatacaggtgcagttctccgtgcaatcgagattgaggcagatgcaatgcttcttgcaaaggcaattgacggtatctatgacactgatccgaaggtgaatccggcagcagtgaagtatgatgaaatttctattcaagaagtgatcgatcagaaactcgcagcagttgatctgacagcatccattctctgtcttgagaataagatgccgatgcttgtattcggacttaatgaagagaatagtattgtaaatacaatgcagggaaaattcacaggaacaaaagttactgtataaactattttaaatagcggaggaattacagcatgaatgaaaaaaacaaaatctatgatgataagatgacaaagacaattaacaatctggatggagaacttgctacaatccgtgcagggcgtgcaaacccacatgtactggataagctggcagttgattactacggaacaccaacaccgatccagcaggtagcgaatgtatctgtaccggaagcacgtatgatccagatccagccatgggagaagagcatgctcaaggcaattgagaaagcaattcttacatctgatatcggaatcaacccgacaaatgatggaacatctatccgtctggtattcccagaactgacagaggatcgcagaaaagaacttgcgaaagatgttaagaaaaaaggtgaggaagcgaaagttgctgtacgtaatgtccgtcgtgatggaaatgttgctttcaagaaactgaaaggaacggaaatttctgaagatgagatcaaagatcttgaagatgaacttcagaagatcacagacaagtatgttgctaagattgacaagatggtagaggcgaagtccaaggaaatcatgacagtctaaatcgaaaaacagcagagctgaattgtcagattgtaatgtggaaaaactgtttacagattatttgtacgcagataagtttttaagaacatggaggcttatttaaggcctccatttcttctttaaagaaagttgcgacagagaggataagaaaatgaacgtaccacagcatattgcgattattttagatggaaacggacgctgggcaaaatcaaaaggaatgccgagaaattacggacacgcacagggagccaagaacgttgagaagatctgtgaagaagcatggcgtatgggaatcaagtacctgacagtctatgcattttctacagaaaactggagcagaccacagaatgaagtggatgcactgatgaaacttttaagaaattacatgaaaacatgtctgaagacagcggcaaagaatgatatgaagatccgtgtgatcggcgatattgaaccgctggatgaggatatcaagagccggatcagagaactggaagaggcaacagccaacaatggagggcttaattttacaattgccctgaattatggaagccgtgatgagatcacaagagcagccagaaagcttgcgaaggattgtgcggccggcaaggtaaatccggacacgatcgatgaatcattatttaattcttatctggatacaaatgacattccggatccagatttgatgatccgtacaagcggagaacaaagattatcgaattatctgctttggcagctggcctattcagagttttattttacagatattccgtggccggcatttacgaaagaagagcttataaaagcggtggaagaatataaccgcaggcatagaagattcggcggagtagaggaggcggaataaagatgtttaaaacaaggttactaagtggaatactattagtgatcatcgcgcttgtcacagtgatcacgggcggaaacctgctctttgcagttttgttattaatcagcctgatcggaatgacagagttgtataaagtatttcacatagagaagaaggcaccaggaattgtcggatatatttttgcaatcctgtattatgggttattatattttaaaccgcttcttccgggagaatccttaaactggtttgttatgctgtttatggcttttttgatctgccagatggcggttcttgtatttgcctatccgaaatataatacacagcagatttttgccggtttttttggaatgttctatgtggcagtgatgctctcttacatttatcagacaagaaatcttccgggaggaatcttctcggtatggcttgtatttgtatgctcctggggatgtgatacttgtgcatactgtgtcggtatgttgatcggaaagcacaagctggcaccgattttaagtccgaagaaatcaatagaaggtggaatcggaggaatccttggtgcagcattgatcggagtattgtatggacttgcaattaattactggggaaatgcggcagcagatatattggaatatgcgattatcggtgcggtcggtggagcaatttcacagattggggacctggcagcttctgcgatcaagagataccacaacattaaagattatggaaaactgattccgggacatggaggaattcttgaccgttttgacagtgttatctttacagcacctattattttctatctttccctgtttctgtaaaaggagatatatgtgtgatagatgcgttgctgatccacagttttgtggattgtaacataaaagcagaatagaggtaaaaagttacgatgaagaaaattgcaattttgggatccacaggatccataggaacacagacattggagattgtcaggacaaatggcgatctggaggttacagcacttgcagcagggaataatattgatctcctggagaaacagatcagagaatttaagccgaaactggcagcagtttggaaagaagaaagagcaaatgaattaaaagacaaaataaatgatctggatgttaaagtagtaagcggtatggatggactgcttgaagtagcgagacagccggagtcagagattcttgtgacagcaattgtcggaatgattggaattcttcctacaattgaagcaattaatgcaggaaaagatattgctttggcaaataaagagacactggtcacagcaggacatatcattatgccgctggcaaaggaaaaaggggtttctattcttccggtggatagcgagcacagcgcaatcttccagtctcttcagggaggacagcagaaggctctgcacaagattctcctgacggcatccggtggaccatttagaggaaagagactggaagatctggcgaacatccaggtagaggatgcattgaaacatccaaactgggcaatgggacgcaagattacaattgactcatctacaatggtgaacaaaggtcttgaagtgattgaggcgaaatggctctttggagtggatgtagatcagattcaggttgttgtgcagccacagagtatcattcattcaatggtggaatatgaagatggtgcagtgatcgcacagcttggaacaccggatatgaaacttccaatccagtatgcactctattatccggaacgtcgttatcttccgggtgacagactggacttttcgacacttcagcagatcacgtttgaacagccggatctggaaacattttatggattgaagcttgcttttgaagcgggaagaacaggaggttcccttccgactgtattaaatgcggcaaatgagaaagcagttgcgctgttccttgacagaaagattaagtatctccagattcctgaaattattcaggcgtgtatggaagcgcataaaaatattgcggctccaaccgttgaggagatactaaagacagaacaggaaacatatgaatttattaaaaacaggtggtaatgtatgggcataatcttggcaattctgctattcagtgcgattgtaatctttcacgaattaggacactttctgcttgcaaagaagaataagatccgtgtggatgaattctctctgggtcttggaccgactatttttggaaaacagtttggagaaacaaaattcagcttaaagcttcttccgtttggcggagcctgcatgatgggggaagatgatgtggatgatatgtctgaagggagctttaacagcaaatcggtctgggcaagaatgtcagtaattgttgcaggtccagtgtttaatcttattcttgcatggatcctctgcatgattattattggctggacgggatatcgagcaccgattgtcagtaatgtgacagatggatattcagcgcaggaagaaggtatcgaaccgggagatgtaatcaagaagatcggaggaaaatcagtttatatctggaacgatatcagtctgtataatatgatgcatgcgggaacaaaaagtgtagaagttgagtatgagcgtgacggtaaggattatacagttgtgctggaaccaaaacagaatgagggagatgcttttcctctgcttggaattacaggtggtgagatggttcgtccgggtctgtttggaacggttcgatacggagcatatacggtgaagtattggatcacatatacagttgacagtctgaaaatgttagttggtggaaaggtaggagtaaaagatctttccggtccggttggaattgtcagtgcggtagataacgtttatcaggaagcagctccggcaggcatggtagtagtgattttaaatcttctcaatataggagtacttctgaccgccaacctgggtgtgatgaatctgttaccgcttccggcgttggacggtggacgtcttgtattccttatcattgaggccgttcgtggaaaaagagtaccgcctgagaaagaaggcatggtacattttgcaggatttgtgcttctgatggcattgatggttgttattatgtttaatgacattctgaaacttgtgtagaaaacaggaaagaataggagttttccgcatatactggaaaaaggaaacgaatcagatgtgggagacaaactatgaaactttttcaaccgatacaaggttcaattgaaagcaaagaaacgcaggagaatctgatcgatcgtggtcagctgcaggtaaatgttacatcttctgtgaatgcatttccagtaaaagaagcacggatttccatctcttatacaggaattccggaaagtatattagaacaggtggtgacggattcttccggtcagacagaactggttgaactgaatgcaccaccggaagaatggagtctggatgagaacgaagaacgtcaaccatattcagaatatacattgaatattgaagcagaaggatttgagtcgatcagtgtttcgggaacagagatcctggcaaacacaaaggcaatccagaatatacgcatgaaacaaaaggatcagagcagggaagaagagcaggtattcgtcatccctgctcatactttatatggaaattatcctccgaagattgcagaggaagagattaagccggtaaatgaaacaggagaaattgtcttgagccgtgtggttgtaccggaatatattatcgtacatgatggatctccgcgggattctacagcacagaattattatgtgaagtacaaagattatataaaaaatgtcgcatcaagtgaaatctatgcaacctggccggcagacaccataagggcaaatgtgctggcaattatgtcattcactttaaacagggtttatacggaatggtatcgaaataaagggtttgattttacaattacatcatcaacggcatttgaccataaatggatcccggagcgcaatatatttgagcctatttcagtgattgtggatgaactgtttgcagactatctgtcacggccgaatgtgcgccagccaatcctgacacagtattgtgatggccgcagggtgagctgtccaaattggttgacacagtgggggtcaaaaagtctgggagaacagggattttctccgattgaaattctaaggtattattatggtgacgatatgtatatcaatacggcagaagcaatctcaggtattccgtcctcctggccgggatatacactggaacaaggttcacaaggccccaaagtgcgtcagatacaggaagaactgaatgtgattgcgggggcatatccggagattcccaaattgacggaagatggaatctatggatctgaaacagaagcggctgtccggaaatttcaatctatattcggtcttccggtaacaggagagatagattataaaacatggtataagatatcggaaatttatgttggcgtgtcaagaatagcagagctttcataaagtacaggatcagttcggacaggagacagtgaaattaatggaaagagacagaagacgaaggaaaaaacgacgaagaaatagaaaaacaacaagaaaaggattcgtgtttcttgtgcttcttcttgtgattatcggagcggcaggtgtattaaagatgacaaaagcagtacccggattatttcgtgagtctggaaatgtccttttgtctgattctggtcagaaaatagaatttccggagttaaatgtatcagaagaagatgttgcagatggtttttattatcagcagctgacggaacgggaaaaacagatttatcgtgagatcctgcagggtgttcgttccatggaagagaccattcttcttcacgcaggcgagaacgatgaggctggaaagatatacgaatacctgatgtatgaccggtcggaattgttctggtgtgacgggagctcaaaaatgacggtatataaagattataccgagtttcatccgtcttatatctgcacaccggatcagagagaatccagacgggagcagattgaaaatgcggcacaagaggcacttgcaggtgcacagggatgtgggacagagtatgagaagatcaagtacattttcaaatatcttgtagatacggtggattatgatcaaaacgcattggataatcagaatatttatagttctttggttgggaaaaaatccgtctgcgcaggatattccagggcagcgcaatatctgttgaaacagatgggaatagaatgtatttacgttgtgggaacagtaaaagagcagggggcacatgcatggaatatagtgaaatgtgatgataagtattatcagatggatgtgactttcggagatccgatctttcaggagaatgagacgggagaaacgctacctcatgatcttgtgaattatgagtatctatgttgtacagatgaagaaatttttacagatcatcagcaagacgattttgtgccgtatccggtgtgcgattccaatgatctggaatattatcgaataaacggtctgtactatgaaacatttgatgagaatgaaatctatgaaaaaatgaaagcagggatagaacagggacaggaaatgtttgctatccgcttttcagaaaatgctgcttatgaggttgcaaaaaagacaattataaacaatctgattccacagacggcggagtttcttgttgacttcagacaattggaagaggtgaaatatacgtatgctgtggatgacagaaagcggatcataatgatcttctggtattcataaaaatgcataaaacaccatttataagtaaaaaataccaatatatattaataaaagtactaagttattcatcaaaaatgatgttgaaatgtctctcatgctgtagtataatctttacaatttgagaaagagggcgctctggaataaagactccatgagcgccttccttttgagaaaaaatatttttacgaagggaaagggtgaacagatgaaagcgtttcttattttggaagacggtactgtgtttacaggaacaagcattggttcgacgagagatatgatcagtgagatcgtgtttaatacttcaatgacaggatatcttgaggtactgacggacccttcttatgcgggacaggcagtggttatgacatatccgctgattggtaattatggaattacaccggatatggagtcattaaaggcatggccagatggatatattgtgagggagttatccagaatgccaagtaacttcagatgtgaaggtacaattcaggatttcctcaagaaatatgatattccgggtattgcgggagttgatactcgtgctcttacaaagattttaagagaaaaaggtaccatgaatggtatgatcacaacaaacgagaattacgatcttgatgaagtaatctctaagttgaagaattataaggtagaaggtgttgtctccaaagttacatgtgaggagaaatacgttttagaaggaacaggtaagaaggttgcacttcttgatctcggagctaagaaaaacatcgcaaaatctttaaatgatcgcggctgcgaagtgaccgtttatccggccgatacaacagcggaggagatcatcgcatctaatccagatggcattatgctttccaatggacctggagatccggcagaatgtacatcaattatcaaagaaatcaaaaagctttatgaaacagatatcccaatatttgccatttgccttggacatcagttgatggcacttgcaacaggtggtacaacttacaaattaaaatacggacatcgcggaggaaatcatccggtgaaagatcttcagacaggcagagtctacatttcttcacagaatcacggctatgttgttgatgaagacaagattgatccaaacgttgcagttcctgcatttaagaatgtaaatgacggaacaaacgaaggacttgcatatgttggaaagaacatttttacagttcagttccatccggaagcatgcccgggaccacaggattcaggatacctgttcgatcgttttcttgagatgatgggaggagagaaataatgccaagagataatagtatcaaaaaagtattagttatcggttctggtccgatcgtcatcggacaggctgcggagttcgattatgctggaactcaggcctgccgttcactgaaagaagaagggattgaggttgtacttctcaactcaaaccctgcaacaatcatgacagataaagatatcgcagatcgtgtttatatcgagccactgacaattgaggttgttgagcagctgatcaaaaaggaaaaaccagacagtgtacttccaacacttggaggacaggctggactgaaccttgcaatggaactcgaagaggctggattcttaaaagagaataatgtacgcctgatcggaacaacatctgagacaatcaagaaggcagaggaccgtttggaattcaaggcaacaatggagaagatcggtgagccggttgcagcttctcttgttgtagaaaatgtagaagacggacttgcatttgcaaataagatcggctacccggttgttcttcgtcctgcttatacactgggaggaagcggtggtggtatcgcgcatgattctcagcagttagtagagatccttgagaatggtcttcgtctttcccgtgttggtcaggttcttgttgaacgttgtatcgcaggatggaaagagatcgagtacgaggtaatgcgtgacggagcaggaaactgtattacagtatgtaatatggaaaatattgacccggttggagttcatactggagacagtatcgtagtcgctccttctcagacactgggtgataaagaatatcagatgcttcgtacttccgcactgaacattatcagtgaactgaacatcacaggtggatgtaacgtacagtatgcattacacccggagacattcgagtattgtgtaatcgaggtaaaccctcgtgtaagccgttcttctgcacttgcttccaaagcaacaggatacccgatcgcgaaggttgcagcgaagatcgcacttggatacaatctggatgagatcaagaatgcaatcacacagaagacctatgcaagttttgagccaatgcttgactacgtagtagttaagatcccgagacttccatttgataaatttatcagtgcgaagagaacactgacaacacagatgaaagcaaccggagaagttatgagcatctgtaataacttcgagggagctcttatgaaagcaatccgttctctggagcagcatgtagacagtctgatgtcttatgacttcacagatctgacagatgatgaactgatcgatcagctgaagaaagtagatgacatgcgtatgtggagaatcgcagaagcatgcagaagaggaatctcttacgatctgatccacgagattacaaaagttgatgagtggtttatcgataaatttgcgatcatcacagagatggagacagctctgaagacacaggaacttacaccagaacttcttgcagaagcaaaacgtatcgagttcccggataatgtaatcgcacaactgacaggtaagacagagcaggaaattcacgatatgcgtcatgcaaacggtatcgttgcagcatataagatcgtagatacttgtgcagcagagttcgccgcagagacaccatattactactctgtatatggaagcgagaatgaagttgaacagacaaaagataagaagaaagtacttgttcttggatccggtccgatccgtatcggtcagggtatcgagttcgacttctgttctgtacattgtacatgggcatttgcaaaagacggatatgagacaatcattgtaaataataacccggagacagtaagtactgactttgacattgctgataagctgtacttcgagccactgacagcggaagatgtagagagtatcgttgatattgagaaaccggacggagcagttgtacagtttggtggacagacagcaatcaagctgacagaagcacttatgaagatgggagtaccgatccttggtacatctgcagagaatgtagacaaagccgaagaccgtgagctctttgatgagattcttgaagagtgcgagattccacgtccgacaggtggaaccgtattcacagcagaagaagcgaaagaagttgccaacagacttggatatcctgtattggttcgtccttcctacgttcttggtggacagggaatgcagattgcgatcaacgacaatgatattgatgaattcatcggaatcattaacagaatcgcacaggatcacccgatccttgtagataaataccttcagggaaaagagattgaggtcgatgcagtatgcgacggaactgatatcctgatcccgggtatcatggaacatatcgagcgtgcaggaatccactccggagacagtatttccgtatatccggcacagagcctgacagaaggagcaaaagcaaagattgctgagtatacaagaagacttgcaaaatcactccatgttatcggtatgatcaatatccagtttatcgtgtgcggcgaagatgatgtatatgtaatcgaagtaaacccacgttccagccgtacagtaccatatatcagtaaggtgacaggtatcccgattgttcctttggcaacacaggttatcacaggaaagaagatcaaggatcttggttacacaccaggacttcagccggaagctgattatgtagcggttaagatgccggtattctcctttgagaagatccgcggagctgatatcagccttggacctgagatgaagtctacaggagagtgtcttggaattgcaaagacatttgatgaagcactttacaaagcatttatcggagctggaatcaagcttccgaagcataaaaacatgattatgacagtccgcgatgaagaccatgcagatgcagtagagatcggaagaagatttgagaagatcggataccatatctttgctacaagcggaacagcacgtgcgctgaatgaggcgggagtaaaggctactccggttcgtaagatcgagcaggaatcaccgaaccttcttgacctgatcctcggacataagatcgatcttgttatcgatatcccggcacagggtgcagagcattcaagagatggatttgtaatccgtagaaatgcaatcgagacaggtgtgaatgtactgactgcaattgacacagcatatgcattgatcacaagtcttgagaatacagatattaagaaactgtcactgatcgatattgcgaaggtgcagtaagataagagcaagaacagttaccgtatgtggtacctgttcttgctctttttaacatactgaacaaagtgtattcggaacgctcctgccttacatgtgcccatggcaatagtaggactgtctttgcttacacaatacaaaacagaaatttatattccagtgaaacgaatccggaaaacaaattttatcacaagagattacagcttgaaaaatattaaatatattcgtataataacgattgtacagtttttcagaaattacaagttgtttaggcacaaatgaatagaactggacaaagacataagagatgtaaattatatttataaggtttcatctgttatgaaatgtcagatatagtaaatatctgtgagttgaaaaacataagggaaagtatgtaagatggttttgtagtcaaatcaaaaggtggtttgactataaaatttaattaaaaatgtaatttacataaggaaaagtatgtaaaactcattattgacaaaaagaacagctaggagtatagtgaaaatatacaaaatagaagactgaataaagaaaaatacacacagataacacaagagggctagatggaaaataaaatcgaaataaaaagagatttggcgcatgtagactatgaatcaggtagatatcagacgatgaaagagcattcagaaaatgttgcgaactatgcagcggagacttgttctctttcagaattgaagatattggttagcttgataggggtgtttcatgatgtaggaaagttgggaagagaaaatcaagaagattttgagagaattctacaatatggagatgatactcataaacatggtttggatcattctactgctggcggaagattaatcagggagttgctgaaggaaaaaagtgtttcagaatttatcagtacggttatatattttcatcacggaatgggagattgcatcaatctagataatggacaaagtttacagcaacaacgggatgagaaacaaatagattatgactggataaagaaagaattctttcagatttatgataaagagatgttggaagaatactgtaaaaaagcaattcaaacatataaggaaatggaaggaaaaatcaatatttttcataaagagtcagaaatatcaaaaagaaaatgtgggaacagatatttctttatgggaatgtatctgagaatggttttatctttacttattgatggggactggacggatacggcttgtttttttcaagatgttccgttatcaaaaagaatttcattggaagagacccagaagatttggaatgaatgtatagaaaaatttgaacaatatatgtcaaaggaaattcataataatccgtcgaatggaaatgtgttaaatacttttcgtcaagaaatttcggatttgtgtagacaagctgcagacaaagaagaaaatctttatcgacttactgtaccgacaggagcaggaaaaacacttagcagtttgcgctttgctctgtatcatgcgaaaaagatgaaaaaacaacacattatttatatagcaccattcaattctatattgattcagaatgccgaggagattcgaaaagcaataggcaaagcggatgttgtgttagagcatcattgtaatgtggtttgcgaagaaggagaagaagaccagtatcgcaaactcactgaaacttgggattcaccgattatagtgactacggcagtacagatattgaatacattgttttcagctcagaaaagctgtatccgtagaatgcacacattatgtaacagtattatcatatttgatgaggtgcaggcaattcctgtaaaatgtatggaacttttcaatttagctgtgaattttcttactcaattttgtggtacgacagttgtgttgtgttcagcaacgcagccaacattggcaccaataaaagagaataacatttgtgaatgtatagaaatggcgggaagaccagaaaagtatgcaaatgcttttaaaaggacagatattaaagatgcaacagaattatatcctggtggtatggagatagaagatttaagtgaatttgtgaaggaaaaaacagaacaatatcaaagtacattggttattttgaatactacggcttgtgcaatgaatacatttcaacaattaaaagcgatatgtccacaagaatatgaactttttcatttgagtaataatatgtgtccacaacataaattagatacattaaaatctataaaacaaattttgaatgaacaatcgaaaaagattatatgtgtaagtacacaggttgttgaagcaggagtgaatttttcattcgggtgtgttgtgaggtctaaagcaggtttggataatataattcaggcagcaggacgatgcaatagacataaggaattaggaagaatgggaactgttttcattgtacagatgtccgaaaaagcagagaaattaagtcatttgcaggaaattagaaatgcgcaggcagcattacaaaaagtattggaagattataaaaataattctttaaaattcagagatacattggattcagaagaggcaataaaagcatattatttaaattactattcccaacttagaacaaatgaaacgaaatttctgatagataaacaaacaaccacgattatagagttattgggagaaaataaagtaggacaattacaatatatcagaagaaatggagaaaaagtaaagacaaaattaccgcaggcttttttgaccgcaggacaggcgtttgaagttatttctaatgattataaagttagtgttgtggttccatacaatgatgaagcgagagaactattggataaattatcgcaggattatctcgagatagaagagcagaaaaagattttaaaaaaattgcagagatatacagttggaatttctgaaaaaagaaaagaaaaactcggaaatgctatatatgaaatttgcaatggagagatattggtattgtgtgatggatattatgacaaggaagtaggtgttgtgaatgaacctaatatggaattgcaaatgttatagaggaggtgagatttttggaaagatacagaaatacaatagagtttgaagtgtatggaacatatgcgcttttttcagatccggttatgagagtgggaggagaaaagacaagttatcatattccaacttatgaagcattaaaaggaattacggaaagtatttactggaagcctacgattatttggatcattgacgcggtaagagtaatgaatccaattcagactgagactaaaggaattcaaccgattgcatacaatggtggaaatgaactggcatattatacttatttaaaagatgtgagatatcaggtgcgggcacattttgagatgaatctcaatcatccggagctggagcaggatagaaatgaaaacaagcatcataatattgcgaaaaggatggtaaaacgaggtggtcgcagagatattttcttaggaacaagagaatgtcaggcatttgtggaaccgtgtgtatttggcgaagacaagagttattatgatacgatgcctggggaagtgggttatggatttatgtatcatgggattacttatgcggaagaggcgattctggaagaggataaagatcagatgacagtgcgtttctggaggccggtaatgaaaaagggcggaattatagaatttaccagaccggaggattgtacggagaaaagacatatacgtccaatggaaagaaaagtatttggaaaagaagtgaataattttataggattagaagagtttacagatgaggaggtggaagattgagttggataaacgaactgattgatttgtatgagaaaaatagcgataagattggagttatcgaatatcgaagagatatcccttatgtacttcttccaccatttcatacaactgtaacggcacagataacggtaacgatagaccaagacggtaattttgttcgtgcagaacaggtggatcagaatgacaaattgacgattataccagttacagaaaaatcgggaagtcgtacagccggaaaagagccacatccattatgtgataatttgagatatcttgccagtgactataaaaaatattataaagacgatggagtatgtagcgagctatatatttcacagcttgaaaaatgggtagaatccgattattgtcatgaaaaggtcagagcaatttatgagtatttgaaaaaatcgacattaattcaagatttagttgcacataaaattataaaacttaatgaagaaaatcaaatagatgagaaagaaaatattcaagggattccccaaccaaaagcttttgtacgatttattatacggtcatttgatgagaaaatatatcaagaaactccggatgaatgttggaaagacagaactttgcaggaatgttatatagaatatgtcagatcacaggaaaaagaaaaaggtatatgttatttgacaggaaatatggaatctatttcttatcttcattcaaagaaaatcagaaatgaaggtgatggagcaaagttgatttctgcaaatgacagtcaaaatttcacctatcgaggacgttttacaagtaaggaagaggcatttgcagtaggaaatgagacctcgcaaaaagcgcacaatgctttgaagtggattattcgaaaacaaggcacttttttcgatactatgacaattgtgacatgggagtcaaatcaattaagcatgccaaaatgggagagggatacagaggcaattgtatctgagtatgaaagggaatatgttggaaatgctgaggatgattgggaagatgactggtctacagaggagattgtatccgatggaaatccaatcaccgccgataagttctataaggcactaagaggctatggtaaaaagatagataatacctcgaatatgattttgcttgcttttgatgcagcaacaccgggaagattagcgttgattgaaaatcaagagctgaattctgtcagatatctgaaaaatatagaaaaatggcataacgattgtaactggattcatacaaaatggaaagatggagaaagaatacaatttgcgggaatgattggtgttaaagatattgcagatattttatatggtattgagaataagggaacggtgtctatagtggatgccaatggtaaaaaactctatgcacaagtagctcaaagattgcttccatgtatatggaatggtactagggttccgtatgattacgtgatgcttgcagtatcaaaggcatccaatccattagcatataaggaacgaagaaattgggaaagagttttgacattagcatgttcgtttgtaaaaaaggataaaaaggatagatataaggaggaatggaacgtggcattagacaaaaaggaaacagatagaaattatctgtatggaagactgctggcagtcgcagatcgaattgaatatttgacatatgacgagaaagataatggaagagttacaaatgcaaaaagatatatgagtactttctctcaaagaccatatgaaacgtggaaagttatagaggaaaatattcgaccatatttgaacaagctagatattgcaaaaaggacattttacgaaaatctattgcatgaaattgatgagctgtttgataaaaacacatttactgataacagtagattagaaggtttatatctacttggtttccataatcaggcatatgatttgaaattaaagaaagagaagtctgaagaaaaagaagaaagttcagaagagtaaaaagaggaggagtagaccatgagcgaattaaaaggaaaaattgatttcacattatttatcagtgcaaacaatgccaacccaaacggagatccattaaacggaaaccgtccgcgaattaatatggatggttttggagaaatttcagatgtatgtattaagagaaaaattagaaatcgttttcaggatttaggacaaaagatttttgttcagtcagatgatagaacagatgatgcttataccagtttaaaagacagagcggatagctgtgcggaattaaaagcagagatgggaaataagaaaaatgcaaatcgtgatgcttgtgcagcaattgcatgcaaagaatggttagatgtaagagcttttggacaagtttttgcatttaaaggaattccagtgtctttcggagtacgaggtcctgtttctattcatcaggcagtaagtttatcaccaatcgatattatcagtatgcagattacaaaaagtgtgaatagtgaatccggaaaagaaagtaaagcttctgatacgatgggaacaaaacacagagttggatttgctgtatataaggtgatgggaagcgtaaatgtgcagcttgctgaaaaaacaggttttagtcaggaagatgcggaagtattaaaagaagcattgaagacattatttgagaatgatgcgtcttctgcaagaccagaaggaagtatggaagtttgcaaaatgtactggtggcagcatgatgaaaaaacaccagcagtttccagtggtaaaattcaaagaggattcactattaaagctaaaaaagaacatccgagagaattcgaggattacgagatttcatggaatgtagaaggatgcaaacaaccggaggaattttaatttgtataaggaagaagaatttcttcaattatctggaattcagcattttgaattttgcaggagacaatgggcactagcgtatatagaactacagtggcaagaaaatgtcagaacagtggaaggtaagattcttcatgaaaatgctcacgatacaagtattaaagaaaaaagaggagatttaatagttgtgagagcaatgccgattcactcccgggaaatgggagtgagcggtgaatgtgatgtagtagaatttcataaagcaaaggatggaatcaatttgtccggaaaagaaggattttataaagtagttccgatagaatataaaagaggaaaaccaaaaacggatgattccgatatccttcaagtaacggcacaggcattatgtttagaagaaatgttgtgttgcacaataccatatggctatatttattatggagagacaaagcatcgtgcaaaagtagaatttacggatgaaatacgcgataaagtcagaaaaatatttgcggaaatgcataagtattacgcgcaatgttatactccaaaagtgaaaataagtaaaaaatgcaatgcatgctcattaaaagacatttgtctacctgttctaaataagaaaaagtcagtttccggatatattgataaaattatttcagaagaggaaaaagaatgaaaagacttttaaatacgttgtatgtgacatctggaaataaatatttgtccttagatggagaaaatgttgtggtattggaagatcaaaaagaaatcgggagaattccattacataatttacaagcgataattacatttggctatacaggagcgagtccggcgcttatgggagtatgtgcacagaggaatattgatttgtcttttatgtctggaaatggaagatttctagcccgagttacaggtgaagtaaaagggaatgttacattaagaaaacaacaatatagaatcagtgataatcgggatgaaagtgtacatatagcaagaaattttattcttggaaaagtatataattcaaggtggattctggagagggctgcaagagattatgcgctgcgtttagatgtggaaacgataaagaaaaagtcagtgtttttagctcagagcatgggaaaaataagagaatgtgaaaatgcagaggaactacttggactagaaggagaagtagcttcagtatatttttcggtatttgacgatttgattttgcagcaaaaagacaatttttatttccatgggagaaataaaagaccgccattggataatgtaaatgcgatgctatcattcggatattctctattggctggaatgtgcggaggtgcattggaagcagtaggattggactcatatgtaggttttttccatacagatcgtcccggtcgaatgtcattggcactagatcttatggaagaattccgaagcgttatggtagatagatttgtactgacactgattaataaaaagattatgaaagaaaaatatttcataaaaaaagaaaatggtgcggttattatgacagatgaaggaagaaaggctttcttatcagcgtggcaatctaagaagcaggaaaccattaaacatccatttttagatgaaaaaatagagtggggaatggctccttatgtgcagagtatgttattagccaggtatttaagaggagatttagatgaataccctccgtttttctggaagtaggtggaaagatgttagttctgattacatatgatgtaaatactcaaacagcagcgggaagaaaacgattgagaaaagttgcaaaagaatgtactaattatggacagagagtacagaattcggtatttgaatgtcaaatggatgcaaccaaatgtagacaagtaaaaaatattttagagaacattatagataaagaggtagatagccttagattttattatctgggtgaaaaatataaaaataaagtagagcatattggtgctaagcctggttttgatgttaaggatacgttgatattctagtgcgaatgataagtgcacataaatttcctaggacattcgcaccaaaaaaaggagaaaactaggcttaaaaatatatgtgaaaatgaaaaaagatatcaacaatagatataaaatgtttattgttgatataatatgcgattttaaacagattatttttgtttaaaattgctgtcatcctcttcgtgaggatgtgagttgaaatataaccgtcaagtgtatcattagtagtgacagcgtcatcctcttcgtgaggatgtgagttgaaatatacataatctaccaaaataagtagtcttaccgccgtcatcctcttcgtgaggatgtgagttgaaatattcagtacgcaaaagtgcttccgcctagaaatgtcatcctcttcgtgaggatgtgagttgaaatgtctggaaaagagttaaaatctaacggagaaattgtcatcctcttcgtgaggatgtgagttgaaatactctatgaacggcataaccaaacatagtgaaatgtcatcctcttcgtgaggatgtgagttgaaatgacaatgactgactacgagttattgaaagaacactgtcatcctcttcgtgaggatgtgagttgaaatattaaagaaaggaagattaaatcatggcaagaaggtcatcctcttcgtgaggatgtgagttgaaatataaccgtcaagtgtatcattagtagtgacagcaggtcatcctcttcgtgaggatgtgagttgaaatggaaatgccatatctgaataatcgatgctcatagtcatcctcttcgtgaggatgtgagttgaaatattgtgtttctacacttaggagaacatacaatcgtcatcctcttcgtgaggatgtgagttgaaatacagcctatattccatttttattgcttacccttgtcatcctcttcgtgaggatgtgagttgaaatgtgtctgactacatgagaaataatcacggagctggtcatcctcttcgtgaggatgtgagttgaaatgtcctctgtgagattggaacgacttctactgctgtcatcctcttcgtgaggatgtgagttgaaatagcttccaatagcaatccaattataggtagcattgtcatcctcttcgtgaggatgtgagttgaaatataaatcgctggggcggcgaaagaatgtatgatagtcatcctcttcgtgaggatgtgagttgaaatcttgaagaatacggtgttaatcatcgttgtagcaatatggttcttcttgtgaggaggtgaattgaaatatctttgatcttctttctcagcttcgcacgaaggagtcactattatacattatttaatttgaatattaaactcaattatcgaaatcttagaggaaatttttacatgtgttcttagaaaaaatgaacaacacctagtagtctccccgattttcatatggtatttgaatgtagaataaagttccgcagtaataataatagatacaattaacaacatagatgatatctagaatttaactgtcaaactcctgatttggctataaaagtatagatgaaaagtaatttgaaaattcatttttgaaaaataaatactataattaagatggcttgtcactcctatataaacgaggtataatgaatttatcaattagcagtctttttaaagaacgaaaataaagttatttcacatagtactttttgataaaatcaggactgcggaaaaggaggactcaaatatgaagatagacatgcactgtcacgtgaaagaggggtccatagacagcagggtagggattgaggaatatatcacgatactcaaggaacacggatttcagggaatggtgatcacggatcacgacacatataatggctaccgctactggaaaaagaatttaaaaggaaagaaacataccgattttgtggtactcaaaggaattgaatatgatacgagagatgcagggcatattcttgtaattatgccagagggtgtaaagatgcgtctacttgagatgcgtggaatgccgcttgcacttctgatcgatttggttcaccgcaatggtggagttttgggaccggcacatccatgcggagaaaagtacatgagcttcactcatgcgagaagatactacctctcacctgagattgttaaacgattcgattttattgagacattcaattgttgtgaaccgaaggattctaatgctggtgccttaaaactggcagagaaatacggtaaggtgatgacaggtggaagtgattcccacaagacagactgtgtcggacgggcatatacaatcttacctgaaccggtcaaaacggagacagagctgatctctttgatccataagaagactgcattcaagacaggtggtgtctattataataagacgacaaaagagaagatcgggaaggtaaataagctccttgtatattctttctgggtatacaacaagagtggtgagctaatgaaacgtcgtgggcggaataagaaaatggaagaagaacatccatttgatccgattgatccaatcgaactgtattatcactcataattgtttctggatagttactatgctttcctgtaagtaccaggtgaaacaccatattttctcttgaaaatgcggttaaagtaggacaggttgtcaaaaccactggcatcagcaatcatcagaatagagtcatcggatgatttgagaagtctggcagccattgtaagtcggtaatcatttaagtattcagtgaatccgattcccatgtgggctttgaagaacttcatgaaatgggatttactataataagtaagttcagccatgtcatcaatcgttagtttttctgtataatgattttctacgtattttaaaacagttttcattttctccaaagatttggaattggaggaagtggagactgtttttttctgacgttcagagatcagaagaaagaaaaagttaaacagagaacttttcacagcaagttgccatccaggtgtctgatcagcacagacaaggtcaatctgtcggatacaattgcttaaggcttcaaaagatccgagagccggagtgagaaaatattcaataggaagagaaccgtcaagaagtggaacgatgtattgaatcatgcacagatcgtttgctccggaagaaagtaaatctggtttgaaaataatattttcatattccattttaaaagtatcatcctgttcgatggcatggagacatctagggggaataataataatatctccactgtgaaccagacgcttatcaaagtccacagaaacaaaaccctgccctcttttaatgacaacaagttccaactcatcgtgccagtgcagtggtactccagggaaatcgagagggatcgagcagagataagtattataaggaaattctgcggatgtatgcgcttttgtttcatgataattctgatattcgttaatgttcatataaaaatgagatcctttcaataaaatgatatctgacacacctgctggtcaaactagattgaattataagaatgatagtattgtacaataaagtgcaagtatattgcaagatatttgaagataatcgtattaaaatacaatcataagttaaaaacaaagaaacaaagtatgtaacataaaaacagaatcagatttgaagggagattattcaaatgaacattcaggaaacattacagcagaaacttggtaaagagattgcacaggcttccaatgaagaaatctacggagcacttcttagtatggtgcaggaaatggcaggagaaaaggaacgtacagatagtaagaaaaaactttactatatttccgcagagttcttgatcggaaaactgctttctaacaacatgatcaaccttggtatttttaatgaagtaaaagatgtacttgcacagaacggtaagaatattgcagaaatcgaagaagtagagccagagccgtcacttggtaatggtggacttggacgactggcagcatgtttccttgattcaatcgcaacacttggacttgcaggagacggtgtcggactgaactatcatcttggactttttaaacaggagtttaaaaataaccttcagagagaaactccgaatccatggattgaagaaaaatcctggttgaaaaagacagatgttgtttatccggtatctttcaaaggacttaatgtaaatgcgagaatgtatgatattgaagtaacaggatataacaataagacaaataaattacatctctttgatattgactctgtagatgagacaatcgtagaggatggaattgcttttaataaagaagacatcgagaagaacctgacacttttcttatatccggatgacagtgatgagaacggaagactgcttcgaatctatcagcagtatttcatggtaagtgcaggagcacagctgattcttgatgaatgtacagcaaagggatgcaaccttcatgatcttgctgattatgcagtgatccagattaatgatactcacccgacaatggtaattccggaactgatccgtcttcttgtagagagaggattagacatggatgaggcgatcgaagttgtttctaagacatgtgcatacacaaaccatacaatccttgcagaggcactggaaaaatggcctgtatattacctgaagaaggtagttccgcagctgatgccgatcatcgaagtgttggatgataaagtaagaagaaaatatgaagatgaaagcgtttctattattgacagaaatgatacagttcatatggcacacattgatatccattacggattcagtgtaaacggtgttgcttctcttcatacagagattctgaaagagacagaactgaataatttctacaagatttatccggagaagtttaacaataagacaaatggtattacattccgtcgctggttactgcattgtaatccggctctcacagagcttcttgatgaactgatcggagagggatacaagaaagatgcagctgaacttgagaaacttcttgcatttaaggatgatgagaaggttcttgacagattagtagagattaaacatgcaaataaagaagcactctgcaaatatctggaagagacacagggagtaaaagtaagccctgatacaatctttgatattcagatcaaacgtctgcatgagtacaaacgtcaacagctgaatgcattatatatcattgataaatatcttgagatcaaagcaggaaagattccggctgcaccggtgacagctatctttggagcaaaggcagcaccggcttatgtgatcgcaaaagatatcattcatttgattctttgtctgcaggagatcatcaacaatgatccagaggtaagtccatacctgaaggttgttatggttgagaattataacgtaacaaaggctgaaaaattaattccggcttgtgatatttccgagcagatttcacttgcatctaaagaagccagtggaacaggtaatatgaaattcatgctgaacggagctgtaacactcggaacagaggatggagcaaatgttgagattcatgaactcgttggaaacgataacatttttgtattcggtgcatccagtgatgaagtaatcgagcattatgcaaaggctgattatgttgcaagagatttctatgagaagaatcctgcgatcaaggcagcaattgactttattacaagcgaggaagttctgaaagttggagagaaagagaatcttgagagactgcagcatgagattatcagtaaagactggttcatgaccctccttgacttcgacagctataaagaaaagaaagaagaagcattgagagcttatgtagatcagaaaacatgggctaagaaaacacttgtaaatattgcgaaagcagggtatttctcatctgacagaacaatcgaagagtacaacagagatatctggcatctgtaagaggaggagaagaacgtgaaaagagcgagcggagtattattaccggtattttcattgccatcaaaatacggaattggctgtttctcaaaagaggcgtataaatttattgatcagttaaaagaggctggacagagttactggcagattctgccgcttggaccgactggatacggggattccccgtatcagtctttctccacatatgctggaaatccatattttattgatctgaagacactgatcaaagaaggacttctgacaaaaaaagaatgtaaagtgtatgattttggagagcaggcagacagtattgattacgagaaaatctacaattcaagatttaaagtgctgaaaaaggcatttgagcgtttcgaaaaagatgaagcatatgataactttatcaaagaaaatgcgtattggctggatgattatagtctttacatggcaatcaaggacagcaaaggtggaatcagctggaatgaatgggaagaagctctgaaaaaccgcgaggaagcagcacttgagaatgcgagagaagaacttgcagaagagattaatttttacaaattccagcagtatgaattcgataaacagtggtcacagcttcacgcttatgcaaatgaacagggaattcagatcgttggagatattccgatttatgttgcatttgacggtgcagatacatgggcatctccggagttattccagtttgatgaagagaataatccggtggcagtagcaggatgtcctccggatgatttttctgcaacaggacagttgtggggcaatccgctgtataattgggaatatcataaaaagacagaatacgactggtggattaagagaatccggcattgtctcaaattatatgatgtagtaagaattgatcatttccgtggatttgacgaatattattccattccttatggaaatgagacagcagtggatggaacatggatgcctggcccgggaatggatctgttccgtacaattgaagaaaaacttggcgaattgaatattattgcagaagaccttggattcctgacagaaagtgtacttcagatgctatccgacagtggatttccgggaatgaaagtaatacagtttgcatttgatccaaatggaggctctgcatatctcccgcataattatccggaaaacagtgttgtatatacgggtacgcatgacaatgatacaacaagaggatggtatcacagtacagataaagcaacgcgagactttgcaaaagagtatatgaatgcacaacgcctggatgaagatgatctggcgtgggatttcatccgacttgcaatgagcagtaaggcgaacctttgcgtaactccgatgcaggatttattgaacctggatggcaaggcaagaatcaatgtaccgtctacacttggcggaaactggacctggagaatggagaagggacagtttgatgaagagacggtgaagagattgaaacgtatgacatggttgtacgaacgtcttccgagagaagttgaaaagaaaataaaatagtaaaagagagagactgtgttgagcatggtctcttttgtttttttgatcattattcagacgtttgcaaaacagctgttttggctatcggatctatttgttagagtttggaaacgcagatactaattttcagaatag
